United States Patent Application Publication US 2023/0390346 A1 - sequence listing, part 7

SEQ ID NO: 10 - DNA, 4084681 bp, Bacillus amyloliquefaciens (residues 1-2,042,341 of 4,084,681)
taaaaaaccatacattgaagtgacatacacgattccgaaggcggacacgccgtctgtcaaagcgtatcataacggagattcgacaggactttcaatatcagctggaaaaaagctgaaggcgccaaaagctataaagtgtggctttataacgggaaagaatatcaagccatttctgtcggcaatgcaacctcttggagcacaaaaggaaaaacatctggccgacaaaagcaaaatcgactccggcaaatataagctgcatacagacggaaaaggcggaagtgaattagcgcttaatccttcgccggtctataaaaaactccggcggcagctatccggcaagtaaaaattactgggtcgcggtcagcgcggttgaccagggagaaggcgccatgtctgcggccgccaagcccgtcattccgaatattggagttcagaaaccaagcacgaaaggctttaataacaacaacgccacaggctggtttgatctttcctggaaagccgtatcaggcgcagccgggtataaaatgcaagtctttaacggcaaaaagctttgaaacgcttgacctcggaaataaaacatcctggtccacaaaaaatcaaaacatctggccgacaaaggcggaaatcagcgccggaaaatatgcgcttcacctgaaagacaaaaaagcgcggaattgccgatcaacccgggccccgtttataaaaatgccggcggacgcaaaccggaaaacatacggatttaaagtaatcgcctataacaaagacggagaagcgatcgcctcaccggaagctagtccggcgctgcctgatatcgcaaagccgaaaatctgacaggctacgtctatacgaacacgaaatcgagccaaacgggttatgtcaatctcatatgggataaagtcaaaaacgccaaaggctacaaaatcaacatctacaacggaaaagactatcaatcattcgatgtcgggataccgatcattggacgacccaaaacaaacacatctggccgtcagccgatgaagtgaaagcgggaaaattccagcttcacacggacggaaaggcgcgaactggcgcttgacccttcacctgtttacgaaaacgcaaacggcaattacaaagggaagaaaactattcctttacgctgaccgcctatgacgcaaatggtgacagtataccgacggcaccttttaaccctgtttccatgaaggtgcggaattcctcggaacggaagaattctggtctattatcgacattccggacggacagctgaacggcgcgacgggaaatgtcatcgtcaatgaagaagatattcaatcgacggacgcggccggggctcggactctcccggacctttaacagccttgacagctctgaccatatttcggccaaggctggtatgccgatgcggaaatgtcgattctttctgaagacggcagagccgtttatattgatgaggacgcgacaacacatgtcttcacgaaaaaatctgacggcacgtatcagccgccgacgggtgtttatctcgaactgacagaaacaagcgaccaatttgtattaaaaacaaaggatcagacgaacgcttatttcagcaaaaaaggcggcaagcttcaaaaagtcgttgacggacacaacaacacaaccgtatacgaatataacgacagcaatcagctgaccgccataacagacgcatcagggcgcaagctgacatttacctatgatgaaaacggccatgtcacatctcttacagggccgaaaaacaaaaagatttcgtattcatatgacaaagaccttctcaaaaaggtgacggatactgacggcagcgtcacaagctacgactatgatgccgaagggcgcctcgtcaagcagtattccgcaaacagcacggatgacaaaccgctgttcactgaataccaatacagcgggcaccgcctggccaaagccgttaatgcgaaaaaagaaacgtatgattacagctatgacgccggcaaaaaaacgctgctcatgacgcagccgaacggccgcaaagtgcagtacgctataacgaggcgggcaacccgattcagatgatcgatgatgccgaagggctgaaaatcacgaccaacactgtatacgaaggcaacaacgtcattcaggacaccgatccgaacgacgcggatgcgggcaaagcgacagaaagctatcaatatgataaagacggcaacgtcacagccgtaaaagacaactacggcaccgaaacgtatcagtacaacaaaaacaatgacgtaacgaaaatgaaggataccgaggggaacgtcactgatattgcgtacgacgacttgatgctgtttctgagacggatcaaagcggaaaatcctcatccgccgtgtatgaaatggaaatctcattcaatcaagcaaagagctggcagcttcggcaagcctgctgaaagacggcagctttgaagcaacaaagctgggctggaatctcaccgctacgagagacagcggaagcatcgcgtctgtaaaagcaagaagcggcgcgctgtccggacaaaaagcactggagatcacctcacaatccgcttcagccggaacagagcacggccatgcgtccgcaacgcaggaagtgcagcttgagccgaatacgacgtatacactcagcggccagatcaaaacggatctgacaaaggcgagagcgtatttcaacattgatctgcgtgacaaagaccaaaaacgcattcaatggattcacaatgaatcaggcgcattagccggaaagaatgactggacgaaacggcagattacctttacaacaccggccaatgcaggaaaagccatcgtctatatggaagtggatcataaagacaaggacggcaaaggaaaagcgtggtttgatcaggttcagctggaaaaaggcgaagtctcttcaagctaaacccggttcaaaacagcagtttcacggctaaagcagatggctggagcacaagcggagccgcgctgaccttgatgaaggcttcgatgatgacagctcattaaaagcgtcccgcacaaatgcatcacaagccaatgcggccgcaaaacaaaccgtcacattaggccaaagcgcgacgataagccggtatatatcacgctgacagggatgtccaaggcagacggcgtaaaattaacgaacgacaatgattacgcgcttcaggccggcgtcacctatgcggacggcacgacgggcgtctacaccgccaaattcccgcaggggacacaggaatggaaccgggcggcggcagtcattccgaaaacaaagccgatcaataaaatcgaaatcagcattctgtcaaaaaaagcgccacagaacggcgtgtttgatgacatcccgattaatcgaagaagcatcctacgaaaaacacctatgacgaaaaaggaaactacgtcacaaaagaaagacgaactagttatgcaagcactgcttcatatgacgagactggcaagaaaatgtctgaaaccgacgcgaaaggcgaaacaaccgcctacaatacgatcaggccgaccagctgacaaagcaccctgtcaaacggcacatccatccttcacagctatgacaaggaaggaaatgagctgaccaaaaacgattcgggccggcgcaaaccagacctatcatatgaatatacgtcatggcaagctcgtcaaaacaaccgaccgctcggcaatgtactgaagagtgaatatgacgccaacagcaacctgacgaaaaccgtttccgccaacggcaatgaagtgtcgctgacctatgacggcacgaccgggttaagtcaaaagcgtataacggcactgaaaaatacaactttacctatgacaaaaacggcaatgaaacgtcggtcacaaacaaagaacaaaatacaacgaaaaaacgcactttgacaacaaaaaccgcctgaccgaattaaccgaccgcggcggcagccaaagctggacgtatccggctgattcagataagctgaaaactttctcatggagccacggcggccaaaaaggaacaaacagctttacgtacaacaaacttgatcaaatattgaaatgaaacggcacttcagcctatacatttgattatgatgaaaacggcaatgtccaacattcatcagcggaaatgaagtcggcacgagcttctcatatgatgagcggaatcttgtcagctctcttcatatcggagcgaaaaacggcggcagcatcttccggaaagctatgaatacgacgccaacggcaaccgcacggtcatcgacagctcagccggcgaaaggtgcagtacgaatacggcaagctcaaccagctcgtcaaagaaactcatgaagacggcaccgtcattcaatatacgtacgacggcttcggcaaccggacaaacgtcaccaccacaaaggacggcgcaagcaaatcagtcaacgcatcattcaatatcatgaaccagctgacgaagtgaatgagaagacctgtcctatgataaaaacggcaaccgcatatctgacggcaaatacacatatacgtgggacgcggaagacaacctgaccgccgtcacgaaaaaaggcgaagacaagccgttcgcaacatacaaatacgatgaaaaaggaaacagaatccaaaaaaccgtcaacggaaacgttacgaactacttctatgacggagacagcttgaacgttctgtatgaaacagacgccgacaacaacgtcacaaaatcatatacgtacggtgacagcggccagctgttatcctatacagagaacggcaagaaatatttctatcactacaacgcacacggcgacgtcatcgccatctcagacagcaccggaaaaaccgttgccaaatatcagtacgatgcgtggggaaatccgacaaaaaccgaagcaagcgacgaagtaaaagacaaccgctaccgctacgcaggctaccaatacgacgaagaaaccggcctgtactatctcatggcccgctactacgaaccaagaaacggtgtattcttatcactagacccagacccgggcagcgatggggattctttagatcagaatggatatgcatacggaaacaacaacccggtgatgaatgttgatccagatgggcattgggtgtggctagccattaacgccggctttgcggcttatgacggatataaggcatataaatcaggtaaaggatggagaggtgcagcctgggcagcggcttcgaactttggtcctgggaagttatttaagggtgctaatcggatttataaagctgctaaaacatataaactatctagaaaaagtgtacggctagaagggcctactcaagttatagggatataactggaaaaacttctagttcaaaaattattctactaatgtaaaaagaagaactttgaaaaaatttaagaagacaaggatggagaaaatcagttcatcatgggggtgttatcactatgacgaaaaatggaataagtattccctaaggaaacatgctaagtcaagtccctatccaaccgcggaatatacacctaaaggtagaaaaaaattcacacacaaaatcagaatgcgacattaaaggggaaataagatggatcactatttattgatcatcctaaggagttaaaagtctatcaatccataattaattccttatgtcacgtagatcaaacattgcctaaacaagtttttaagcaaaggaaaaattattatttatcgaggaattccattgggtatatctgaagaaagttggggaatgtttaagagtttggctaatgaacatcatgatgagtttatattaatggctgttatagacagttctgaacatataaaccaattctacgaagaatttgagtattttaactggataaagatccctttgcatataactgcagatgagtatctgtcactcttaactgattatccaaagcacagtaaaagtgactgtataatgaatattgcatctcgtgtgtttgggcttcaccgactttaaagtgggcgatttatggtgaagagaacttgaaatctgtattctaggtattgatcatcagagtgaaggaaaagaactagcaacttggagatcgttagatggcgttgtcttagattggatatcagttgtattcccaaatcagacggttccagttgaatttgaaaaacacttacggcacattacaaataagtatattttaatacctactaccgatatcatctgattgttctaaacgggatttcaaataatctccagatagtatttttgcattcaacagatatttaatgacaaatatgcagagtaatatattttggggcttgtttgaataatctatgtttatcatcaagacacttctatcaatgggtttgttagtgttagttaggagaaggagaagacaatgcacaaacaaattgaacaatagagtagattatattgacgagggatgtaatattttaaaggtcgattatcagttctttaaaaaagacctgttttaaggttcaggttgttaaaaatgcagcatctgttatttagtgcagatattggtgatatgagattagaaaaaatagattcggaagaatacaattggcaagtatttgagatgagttaccacccggaaggaatcggtaatctatcaaatgctgtaattccggagtatcaatcaaatgctaattttctcattgacatgaacagaatgctgattgctgtagaagctgaaacagttcgctttgacgaccaatcattttatgcgtatcatccgaaatcataaataaacaaataagagaggttcccagcctctcttttcttacataacgaaatcgttcgcggaggcaaacatgaacactcctttaaatttacaaaaagaatcattgagggctatagggaatctggatgtgattaatccgcttaaatacaattcgatttattcatgtgatctagtgagtaaagatactttttctcaaattaatgaatgacttagagttcgaaacagctctaatagaagtaatggcattcccttcttttattgaagaatggaagaagaaggttgaaaagaaaatgataaatatgaatactgtatcgaaaaagttcattcatattgaatgtgtcctaaccaaagaagaattgatggcagattacttattagatgaattatattttttagcatcgatcaatgattttgttgttataatagcaaaccctgccaaaaataagtcctgcatgaacctgaacactcaaaaggttgatgtaactactgaaagtaatgaaaaaatcatttggtttgaatacgatgcagcagatttatatatcattgattaatttaatataaatttcaggttcctattcaacggagtgttgctgatgttaaaacttaccgcggagcgtgttgggtcatatgaaagggaaaatatcatttatttcaatgcgggtcgggatgatcaagtatttattgtgtcggtgcacgatcacaaagtaatattggaggttatgaaaggcagctctcttttaatcaaaaaagagttacacggattttctgaagatgcccatttctatctgattgattcgtatgatgacactatcgtgatcgtttacctggagaatcatacgtgtcaattggctgcatactgcgtaaacagtaataaaatcaatccgatttgttcttttctattaagcgccaatgtatttcatctgggtgaggatggattattatggatcggattaacggacgagggtatgtatgatgagagaaatcctcaaggaaaagcgatatttgcttttcatgcagaagacagaacgttttattttgaagacgattttaaagaaatgatgcacgaatgctatgccgtacaatcgatcaaatctgatttgtatgtatgtttcgagggagaggattgctgtgtcatcgggcattatcagattggacggacagaattcgtactgttgcagaatatgtgctggacggcgatcaatactcctattgtgatcagctatccgttcgaaaaaaagggtgctgctgattcagagtcacgatgataccctatttgcatttcatgaagagcacaaagagactgacgtcatgatacacggtattgatagaaaaggagaaacaacgtacagagccgtacaggatcgcatgtttatctttagtgataacgatttatatctggtaaagtattgatcaatcctatgcagatggctttttacagccatctgcatatcattttacggagtgaacgatcgatataaataggataccatccaagactcaaggggcaatgacatgaaaataaaaatgaataagatagtcgaagaatcagtaaaaggatgtttttgtcattttgataactgcgggcgtctgtatctcggacggcatcagaatggcgggctttcgtttacgatcatcgacaaatcgggcgatacgcgagtgattcatatcgatgaacaaatcccgtatgaggatattatgctgttccaacagagttcggctgactggtatgtgttgattttctttgaatcgcatgagtataaagtgaaagtattttcagcagaaggaacagaacaaagtgcattttctctcccttcaggggtttcatgcagtcttttggatgaaaaacaaaacctgtggatcggtttaagtgatgaaggtatttatagtgatgaaaatcctgaagggcacagtgtgctgtgcttcactttagacgggcagctaaagaaaacccacattgatcagcagctttcagaaatatatgcgcccgcggtagatgactgttatgcacttgcagaaaaagacggactaatctacatgctgtattacgcttatacagtcattgctgcgtttgaagaaaccgacgtgaaacgagtgtggattatttctgataaagcatattccggggtttacgaccagctagcgatttcagataacgggttttgggtatgcaaagatgatcattcactgtctctcattccggccgatgtcagtctgccgatgcaagagataacgtgctgtgatgcggatggcgatgagctttccgggcatcagctgaagctgactggcgatgccatttacgcggtctcgaattcagggatttataagcgggatatcagtaatgggaaagcggctaaatgagatgttaagatccaacagatattctttaaataatgacgtcatcagaagcttgaaattacacaaaaagaattagaggggccgctgccttcagatgcagggagattcgaagaagactttgagggtgctgcctgcgctggggatttttatgaatacttcgcacttgtctgcggcagcttagattttgttttggcgaataaacaaatgcctgcacggcagcgtaaagccttatataaatccttttttgagctgtatccgcaatatgcgcagctgaaaaacgctttgatggattatccggagctcagccaggaaatcgggcggcacgaacgggccaggaggctgttagtcagcattttaaacaagaaatgaaaggcaggattttgacgtgaaagaacccacaagagcagaatgtctgaaaaaggctggtctgatcctgaacggtcaagcggcgagggaagaagtgtcggattgggcgtctgagtatgtgagtgcaggtgatccggcggatgaggacgaaaccgtttgggagatgctcgtatatttgagcgggtttgatctgaaagattcgcctgatgcgtatctgcatacgatagaagaattaagagattgggtgcaggaatataaagaagttcatggggatttgtaagaaaaaaattcatttgagtcagacatgtcaattcagctgaaaaaaaggaggcgcaaaatggaatggcacaaacatgagaaagcagttctgccggggccaggttcgccgggttgttttgaattgacggagtttacgttctataccgggtataacgagtattatgataaaatcccggtgtttgagctgaagctgactgacggacagtatgatgccgtgctgcggtttgaggatgtgaggtctgcccggctggatgatcttgaaagcatcaccgacatccatctggatatcagcccagtcgacggcggctgggaatcgatccgctactatgtcgatgacggggaaggaagtatgagcttttattgcgccaaatgggtcgtgctcgacatgaagaaaaagcagtcccccgaacggcccggcaaaacgtcagggtaaagcggcggcatttcgcgtataatgaggggagccggacagagaaggagtttagtcatgaatgagtttaatgaatatgcgatcagccccgagatccgacgggcgctgaatggcttgcaatacaccgagccgactgaagtgcagcggcgcgtcatccccgccgcgctgcaaaaaaaagacctcgtcgtcaaatcgcagacgggcagcggcaaaaccgcggctttcggcattccgatctgcgagcttgcggagtgggaggaaaacaaaccgcaggccctgattttaacgccgacccgcgagcttgcggcgcagattaaagaagatatcacgaatatcggccgtttcaaacggataaaagccacggcggttttcggaaaagcttcttttgacaaacagaaaaccgaactgaagcaaaaaagccacgtcgttgccggaacgccgggacgtgtgcttgatcacatagaaaaagggacgctgccgcttgaacggctggcgtatgtggtgattgacgaagcggatgaaatgctgaatatgggatttattgaacaggtggaagccatcattcagcatctgccgaaaaacagagtcaccatgttgttttcagcgacgctgccggatgacgtcgagaagctgagccgcacatatatgaaagaccctgaattgattgaagtaaaagcggaaggcctgacgacaaaagacattgagcattttgtcaccagaacagaagaagaggataaatcatctttgctgcgtgatgtcctgatcaccgaaaacccggacagctgcatcatattctgccggacaaaagaaagggtcatccagttaaccgatgagctggacaggctgggctacccttgtgataaaattcacggcggcatggtgcaggaagaccgctttgacgtcatgaatgaattcaagcgcggcgagttccgctatctcattgcgaccgacgttgccgccagaggaattgatatcgaaaacatcagcctcgtcatcaattatgatattccgcttgaaaaagaaagctatgtgcaccgcacaggcagaacgggccgcgccggacaccgcggacgggccgttacgtttgtgacgccggctgaatcgcggtttctgaatgacattgagacatatatcggtttccgcatccaaaagcgggaggcgccgtccgagaaagaaacagcggaacggaaagcggcttttgcggaaaaattgaacgcccgccccgatgtcaaaacagacaaaagcgaacagttaaacaaagacatcatgaaactgtactttaacggcgggaaaaagaagaaactcagagcggtcgattttgtcgggacgatcgcgaaaatcgacggcgtttcagccgatgatatcgggattatcacgattctggacaacgcaacatacgtcgaaattctgaacggaaaaggcccgcacgttcttgacatcatgaaaaatacgacggtcaaaggcaaaaaactgaaagtccataaagccaagaaataaaatagaaagcctgccgcgtgcaggctttttttacgccgtttcctcaggcacaaacgcaaggatggcaatgccgatcacaaataacaaaatcaggctgaacacggcggctgacgaatttccggtcagctgggcggtgacggcaatcaaaagcgggccgataatcgaagcgaacttgccgaagatattataaaatccgaaaaactcattggcgttctgtttggggacaagctttgcaaagtaagagcggctcagcgcctgaatacctccttgggaagtggcgacaagcatagccaaaacccagaaatcaaaagcggaatccataaaataagcatacgtgcagacaatcatatacacgccgattccggcataaagcattgtttttcctttaaaccgttcggccagccgctcgtacaaaatcgaaaaaggggcggcgacgacctgtgtgacaaataaaacaatcagcagatttgccgcgctgatgccgaggtcagccccgtatgacgtggacattgtaatgatggtgccgaccccgtcgatatagaagaaataggcgagcagaaacaaaaacagcgcccggtgcttcctgatctgcttcagcgtgccggccagccgtataaaactgctgatcacaagccgcggctccctctcgatataatagcgctggcggacgcggagaaggagcggaatcgaaaacagtccccaccatgccgccgtaattaaaaaggcaatgcggcccgcagtctgggcggacagcggaatcacctccgcttgtgctgacagaatcacggcaatgctcaggagaaaagggattgtactgccgatatagcccagcccaaacccctggcggacaccatattcatccgctcctttgcggccacatcaacgagaaacgcatcataaaacacattagatccggcaaagccgatcgtggaaatcgtataacaaattaataacagcatccaagattcgccgggaatcaaagccagcgcggcggtgcccgccacaccgatcagaaaaaagaaggcaaaaaaccgtttcttgcatcctttgtagtcggcaatcgttcctaagacggggctgagcatcgccaaaataaaagtcgcggcggcaatcgtatagcccaaataagcggtggaatcagctgcgctgacgccgttttccgccgccgccgctttaaaaaacaaggggaacaccgccgtcataataatgaccgaataagctgaattggcccaatcatacagcatccagctgctttcttctttcgaaaaccgtttcatcacacacgctccttcccaaaaaccggttctctgcattatatgcgcctctgcctcatcgttggacaatgatttctgaacggcgttttctgattgacctggagatattgacctggtacaaaaaggatgtacaatcaaggtgtagcaggtaaatggtcaggcgggagggagacggaattgaagattgcgaaagtcaataataataatgtcgtcagtgtgctcaaagaaggcaatcaggaattggtcatcatgggccggggcattgcttttcaaaagaaaacgggagatccggcagatgaagcccgcattgagaaagtgctcaccctcgataacaaagatgtatccgaagttcaaaacccttttgtatgatattccgatcgagtgtatgaaagtatccgaggagattatcagctatgcgaaattacagcttggcaaaaagctcaacgacagcatctatgtgtcgctgaccgaccatattactttgccattcagcgcaataagaaagggctggatatcaaaacgccttgctgtgggaaacgaagcggctctacaaagacgaatttgcaatcggaaaagaatcgctgatcatggtaaaaaacaagactggcgtgtctctgccggaggatgaagcaggttttattgcgctgcatattgtaaatgccgagctgaatgaggagatgcccaatatcatcagcattacaaaagtcatgcaagagattttgagtatcgtaaaataccattttaagattgaattcaacgaagaatcgcttcactattatcggtttgtcacccacttaaagtttttcgcgcagcgtctttttaacggcacacatcgactttttgctggagaaaaataccgtcgggcgtatgaatgcacgaagaaaatccaaacttgcattgagagggcgtatgagcacaagctcaccagtgacgagctgctgtatttaacgattcacatagaaagggtagtcaaacaagcataatgaaagcgttggcattattgttcttggattcattttttcttacattcacatatgatcttgttaggattgttgctgataagcatgcaaaacctaaattacaatgagcgcggatcatttctgtttgtgctgatggtaatttaggtttttttaagattcgttattatcattattctgaccgatgttcccttttaacagaatcatgtatgatcgataaagaaatcgctctcaaagaaaggggaatgccgacatgttttatcgtatgaaacgagtgctgctcattcttgtcactggattgtttttgagtttgtgtgcgatcacttctgctgcatcagctcaaacaggcggatcgttttttgaaccttttaacagctataactccggtttctggcaaaaagcaaatggttactccaatggagatatgttcaactgcacttggcgtgcaaataatgtatccgtgacgtcatcaggtgaaatgcgtttggcgctgacaagcccgtcttataacaagtttgactgcggggagaaccgctccgctcaaacctatggctatggactttatgaagtcagaatgaaaccggctaaaaacacggggatcgtttcatcgttcttcacttatacaggtccaacggatggtaccccttgggatgagattgatatcgaatttttaggaaaagacacgacaaaggttcaatttaattattatacaaatggcgcgggaaaccatgagaaggttgcggatctcggatttgacgcggccaatgcctatcatacgtatgcgttcgattggcagccgaactctataaaatggtatgtcgatgggcaattaaaacatactgcgacaagccaaatcccgacaacaccgggaaagatcatgatgaacttgtggaatgggataggtgtcgatgactggctcggttcctacaatggtgtaaatccgctatacgctcattatgactgggtgcgctatacaaaaaaataatgtacagaaaaggatttccgccagcggaaatccttttttaattaaaacgaaataatcccaatcaaaagcgccgcaatcgtcatcacaatcgttgttcccacggcccatttaatagtgaatttttgatggtcgccaaagctgacgcctgccattccgaccaatagataggtggatggcacaagcgggctgagcagatgcaccggctgtcccagcaaggaggctcttccgatttcagcggcgtctattccgtaagcggaagcggcttcggcgatgatgggaagaacaccgaagtaaaaggcgtcattcgacatgaaaaaggtgaaaggcatgctggcaatcgccgtgatcaacggcagatgcggacccatggcatcagggatgagggaaacgagagaatgcgccatcgcatcgaccatttttgtgcctgagagaatgcctgtaaatatgcctgccgcaaacaccattgagacaacgtttaacgcattacccgcatgcgccgaaatccgtttctgctgctctttgacatttggatagttaatcatcaaggcgatggcgaacgcgatcataaaaagaacagggatgggaagcaggctggtgatcagcgcggccatcagagcgacagtcagcagcaggttaaaccactggagagcgggacgcttcagcggcgccgcctccggatcagaagacggcgcgtgttcaatcgaaatgatgccgagacgcttccgttctttttttccaaggagataagcaacggcgatcacccagagaacgccggcgatcatagcgggaatcagcggcgtaaaaacttctgacgtgtccaatttcaaggaagccaaaaccctcgccgtcggtccgccccacggaataatattcatgacgcccgaaccgagcatcgcaatccccgccagcaccaaacggttcatgccgagccgtttgtaaaggggcagcattgccgcaatcgtaatcatatacgttgttgtcccatctccgtccagcgaaatggtcatcgtcagaaccgctgtgcctacggcgatttttaacgggtctcctttgacaaacgataagattttggcaatgagaggatcaaacaggcctgagtcgatcataatgccgaaatacaggatggcgaataacagcataatcccggtaggagcgaggtctgtaacaccctgaatcatcatcccgccgagatctttgccaaatccgctgatcagggcaaacacaacaggaacgacaatcaaagcaataagtgcggaaagccggttagacataataaggtacataaaaacaatcatcatcacaaaaccgagtatggcaagcatgatatgacctcccctgttcaacagctgttttggtaagcgctttcacattttgtttctgtgaaaatggcttatttcaaaatgtgtatgaccgcatatgtaaatacagacctaaaatcctaatgagcggatcagcagtttatttaaagaacgccgcgggtaaatgtgctgtagaatgtttcgttttaaaaggggaactgacatgagtgatgatcaaaacaaacgagtaaatgaacactcaaaggacgaacagctggagcagtaccgatctgataacagcggcaaaaaaatgacgaccaatcaggggcttcgcgtgtctgaggatgagcattccttaaaagcgggcgtccgcggccccacgctgatggaggattttcattttcgtgaaaaaatgacgcactttgaccacgagcggattccggaacgggttgttcatgcacgcgggtacggcgttcatgggcattttcaggtgtacgaaccgatgacggaatatacacgggcgaaatttttgcaggacccgtccgtcaaaacacctgttttcgtccgtttctcaacagtggcgggctccaaggggtcagctgacaccgtccgtgacgccaggggatttgcgacgaagttttatactgaagaagggaactatgacctcgtcggaaacaatattccggtgttcttcattcaggacgcgatcaaattcccggatctcgttcacgccataaaaccggaaccgcacaatgaaatgccgcaggctgcgacggctcatgatacgttctgggattttgtcgcaaacaatcctgaatccgcgcacatggtcatgtggacgatgtctgaccgcggcatccctcgaagctatcggatgatggagggcttcggcgtgcatacgttccgtttcgtcaacgagaaaggaaaagcgcgctttgttaaattccactggaaacccgtgctcggcgttcattccctcgtatgggatgaagcgcagaaaattgccgggaaagatcccgatttcaaccgccgcgacctatgggaaacgattgaaaacggcggcaaagtcgagtatgagctcggtgttcagatgattgacgaagaagatgaatttaaatttgatttcgatatccttgatccgacgaagctgtggccggaggagttggttcccgtcaagctgatcggaaaaatgaccctcgaccgcaatcaggacaatgtctttgcggaaacggaacaggtcgcctttcacccgggaaatgtcgtgccgggcattgatttcaccaatgatccgcttcttcaaggccggcttttctcttatacagatacacagctcatccgtcttggcgggccgaattttcacgagattccgatcaatcggccggtctgcccgttccataacaaccaatacgacggctaccaccggatgacgattaataagggccctgtcgcctatcataaaaattccctgcagaacaatgatccgtcgccggcctcagaagaagaaggcggatacgttcattaccaggaaaaagtagaaggcagaaaaatccgccagcgcagtgagagcttcaatgactatttttctcaggccaagatgttctggaacagcatgtctcccgccgagaaagaacatatcatctccgcgttctgttttgaagtcggaaaagtgaacagcaaggatgtgcagcagcaggtggttgatgtcttcagtcacgtcgacgccgggcttgccgagcgtgttgcgaaaggaatcggcgtgaacccgccgccgaaggaccgtgaatctgatgaaacgttcacttccccggccttaagccaggaaaacacggtgaagacggcagcgacaaggcaggttgcggttttaaccgaccacgggttttctgatgagaaagtcaaacaagtgcttgacgcatgcaaacaggcgggagtcagagccgatatcatcagtcctgtgcttggaaccgttaagggagaaaacggcacggagctcgaagcgtcagccacgttcctgacagcggattccgtcctgtacgacgctgttttcattccgggcggaaaacaaagcacagacagcctcaaagcccaaaaatcggccagagacttcgtcaacgaagctttcagccattacaaagcgatcggcgcctccggtgaaggaaaagaacttctcgccctcgccgccggaaccgaaagcggccccggtcttgttccggacggaaaccatgaacaatttctgaaagccgtggctgagcatcggcattgggacagaaacgtataagaatgaaaaagcgcctttgatgagaggggcgcttttttcttgtgaaagaatattgggagaaaacgaaaattgcttccgtacaaatccgtatcttccgctgtcctggacattcagacaacagttttagagagtcagggcatgcgctatttaaagcaggcgggttgatgaaataatagtttcaccctctttggtttacttccgccctgtgtttgtgtatcttaggggtagattttctggaggagcgattgatagtgaagccgtttaccgaaaaacaacttgaagaatattaccggcgtgacgaaaacatgatgattttggtgtttgcccaatggtgcgtcaatcatgaccttgatccgatggccatttacagcaaagcttaccccggacagcctttaaacgaagagctgcgaaaaacggctgaagagcttgtcgtgccgaaggaggaatcagaaccgattcctgatcaaaccgtcatcggcgttttggagatgttcggcaactccgatttggcggaagccgtttatgaagccattgcgcaaagaccttcacggtaaaagaggcgtggattatccatgtctctttttttcatggagaaaatgtgaaagaaggcccagaaacaatttgctgatctgcgctgtctatagagtgtaatccgttttcaaaaagggaacggtaatgaaaaggaggagttgtgatgaaaaaggcattcaaaatgatggcggccgtgctcttaaccgtgctgacagccgcgccgttcggaggtttcgcgccttcagccgaggccgcgcaaactgcaaagcccgtcgtcaaaagccagacgtataagcatgtaaagcagctgacgtaccccgaggtcacaaatacgggaaacgcatcttttgaaaagaaaatcaatcaggacttcaaacgctatattgaaaactcgtaccaagaatatgtaaaaaacaaaaaagacggtgaaaaacaaggctacaaagcggaataccaggcagatttcaaggtgaagtataatcaaggcggcaagctcagcattcagacggaaaactacagttacacaggcggcgcacacgggctgacagccgttcagacctttaattacgacctggccgcaaaaaaacgggtcacactcaatgatgtgctcaatacaaaaacgaaagccaacaaaacgagagactatctttacggctacatcaagaaacatgacgatctgtttgaccaggacgtcaaaaaacaagagatcatcctgaataacgaaagacctttcttctttacgaaaaacggcattgccgttgtgtttggacaatatgatctcggaccatacgcggcaggaatccgggacgttttcgtgcctgcatccgtctatcaataaaaaaaagcgatatcactctaaaacggagcggtatcgctttttttattttaccagacaaacaatccgacaatcgccgcgctcaataaggaaacggcaattccgctgacaagcagcttccagacgttttttccgatgatggctgacttttcaccatcaagcagagattgataagatccgtagatcataccgatggtgctgaagtttgcgaatgatgtcaggaatgtcgtagccacggcaatcgtgtgcggcggaagtgatttcagctgccctttcagatcggccattgccacaaattcattcgtcgcgagcttgatgcccatcagctgtgcgacatacatcgcgtcatgtacgcctaatccgagaaggaaggcaaacggactgaagatgtatgagaaaatcttttgaatggtcaaaccgtgcatgaacagtccgagtacgccgtttaacgcagccgttaacgccacatatccgattaccatcgctaaaataacaatgaccatgttcatgccgacaagcatactgttagaaatcgtggagaagaagtcttttttctccgcttttgaaggaacgtaaataatatcatcctctttagaaacgtccacgggattcagcatattggcgattaaaagcgcgtttaagcaattcagcgggatagctgtaaacacataagtggacggaaccatcgtcaagtacgatccgatgatcgaaccgctgatgctgctcatgctcatcagcccgaatgtcagaagccgattgttgctgacggcggcaagctgctggcggatgacggctaaagcttccgtatttcctaaaaacatcatctggatggagaaaaagctctccagcttcggcagacgggatattttagaaatcagccagccgattttatcaatgagccacggcagaataccgaaatacgacagcatatcaaagaaggtcacgacgaagataatcggcagcaatgcgctgaagaaaaaatcaaccgtcggattggccatgatagacggaaaagcgaacgcaattccttgactggcgcaggaaatcagccatgtaaagaacgcgccgatcttcccgatgacaaagccgccgacttttgtccctaacataaaccaagtaatcagaaactcaaagacgaggagcatgacaatcggacgccatttaatcttcttcttgttgggagaacataagaaaacaacagccatgacaacaatgagaccgacaatgttcaataaaaagtacatgtgagcaactcctataagggtattatggaaataaaaaaagctcttattcgtcacaaattcctgaaagccagaaagtgtgataaataagagccaaaagaaaagaatagactgagagcatcatatgcttttcactcgttcaaatttatgcaaactttcttgtagtctagtcttttacggcactaggtagaaacaatcagaccatattactgatcatatacaagaataacgatattacatgagatagcagtattttatcgtttcaatttttgaaaatcaacctttttagatattttcaaaataataaatttatattataaataaagaaaataaaggatgttcacaagtaattggattaaaaaggtataaaaagcccccgaaaaacagttccggttcattgtaaagacgggatgcagctgataaaatggatctgagggcaccgccttcaaaagacggcagaaaaggggtcattttcatgatcattcagttcattcgttacagataatgagaggtatagataaataggttaaacttccaattttgcgaggtttatttgtctatgcctttttcatttcatcggaataacgaatgaatgaggtgtttttattgacgtctataaaaagaaaacgcgcggaattactgcaatcatgccagtccgtattcaggtgtccgctatgcagttcggccatggcggtctcacaatacaaaagcttgatgtgcggacacgggcatacatttgatatatcaaagcaaggatatgtgaatttcctcaataaatcggtcaaaacccgctatgacaggcagctgttcgaagcgagacgcgctctttttgacagccgggaattttttgggccggttcaaaaggagatcgccgccatcatcagccgcattcaatctccgcaaacaacggcggcgatattggatgcgggatgcggagaaggcactcatttagccgccgtatgcaaattgcttcagcccgctttttccgtgacgggaatcggcattgatctctcgaaagaaggtgtgctgcatgccgcaaaggccttcggggatcatttggtttttgccgtcgctgatgtggcggatgcgccgtttgccgacagctgttttgatgtcgtgatgtctgttttatcaccttggaattacaaggaatgcagcaggcttttacgaaagggcggcacagtcattaaagcggtgccgcggcgtgattatttgaaggaagtaagggaattcttcttcggagacagtcctcggcggaatgacaccgccgattctgcggccggacgattccaagcgggctttcaaacctttgagcgcaaacggctgtgttacacgaagaccttatcgcagcctgaccttgagcggcttgtgaaaatgacgcccttaacatggaaatgtactgatgaaagcatccggcggtttatcagccgaaaagcggcggatattacgatagatatcgatattttaatcggaaccggtcctctgtaaacagaaaagacacgctgatcgcgtgtcttttttttatttccagacttcaccggcaatgttgacgacatgacgcagtttcgcccattgctgttcttctgtgatcaggtttccttcctcagtggaggcgaatccgcattgcgggctgaggcaaagctgatccaggctgacatattgtgaagcttcttcaatccggcgtttaatcgcgtccttgtcttcaagttcgccatgttttgatgtaatcaatccaagcacaagctgaagatcagagcgtttgacatagcggagcggttcaaagccgccggagcgggaatcatcatattccaggaacaatccgtcaaggtcaagcccgtcaaaaatcgtttcagccgctgcatcatagccgccttcagccgtccatgtggattggaagttgccgcggcagatatgcatcgtaaccttcagatcgtcagggcggtccttgatcgcgtcattaatggaagcggcaaacagcttgcgcagctcatccggcgttgtgccgaaatcttcaatctgacgaagccccgcttcagataagaaaacggcccatgcggtgtcatcaagctgaaggtagcggcacccggcgtcatagaaagcctgaatcgcttttttatacgcttttgacacatcgtgctgaaattgtttgtaatcattctggtaggccgctttttccaattttccgcggaaaaacagcatattcggacttgggatggtcattttcggaacagcatcgccggcaatgctgtgcaggaatttataatcttcgagcatcggatgctgagaaaaatcaatatctcccgttactttaatgccgcgcgctttcgtctgtacgttgtgaaactgaatgccgctttcaggcgtaaatgcctcaaccccgtctaaattttcgagaaaatcaaaatgccaccaggcacggcggaattcgccgtcagtcacgacattgaggccggtttctttctgcttttccacgctgcggatgatttctctgttttcgatttcgcgcagctgttctgccgaaatctcacccgccgctctttgcaggcgggcttgcttcacagccgccggccgcagcagacttccgacctgatccgcgcgaaacggcgggttttttcttagaagagtatgcaatggttgttctgtgttttgctgtgacatgaacgattccttctttcctgatgaaatgaaatataaaaaaactcttccctcggatagggaagagcttgcgtccgcaaatctcaaccttatcttcaggatttagcaccattctgctgaacagcggttgccgggtatcatagggccagtccctccacctctcttgataaggaaatatgctatttttcagaataaactgtaatactcttaatcttagtatgttttctcatattgtcaatatatttcgataaatatttttatttgtcaccctcaaatagaatcatatctatcacgatggcgatcgcaagacaaagagcaatatcctcttccttttcaatctgcaaatgataggaatcgccccagctcatccatgatttggtgacggtcatccggtttgattttccgtctgtcacttgaaaattccggccccacacatcgccggtaagattccagccgagtccggaaatttcaaatttcggtttgaaaaacgtgactttcttgatgacttggcagacgggtttgccgctgacggaaatctcgtaacggggaacgagcgacatcagtttctgattgacgctggcgagcgtgcggccgtccaaatcagtcagcttcagttcatcaccgaatgaaaacagctttccttcaacattgtagacttcttttccgctttcaagaaacacttgaaaacgattcttaaacgtaaacattcgctctttgatgtaaaaatggtacataaaaaaactccttttttatgttttacgaaaaaaggaggcggaaggtttcatatcggccgggtgcataaaaaaaggctgccgattttgcggcagctgtcgtttttatgatagcggcatccggcgtttttgacggatcgcatttaaatcaatgatgttattcgtgtcggcagctgtcaccagcgggcttgtctttggcgttttccggcggttgtccttactgaaagagaaaacaagataccctgtcaaagcagcgaaaataagtagcatcattttacatacctcccaaaaaaagttttggtattattattgtacgaaaaaacaaacgaaaagtattcaaacaattgtcacttttttaaaaaataacgtcattttccgtaaaaataactatgggttgaagaaattttgctcttgttgtggttctatagattgtatcggctgatgaatgatgatcgtttatataactttattactattttttgtaagtgtctaattaactacttcggtgttttcgtttgccttgtgttattcagtaccctaaaaaaccttatgatatgcaaaataactgcttctaacagatgactgcgagttgacagcgctttctttatttttttaaagaaaacgagatgttatcttaaaaaaatcgtttgaacattttccgcagttttttaaaagggtttgattttgtctccagtacacgcgggtcttttaaggtttttttcaattctttcgctacagtccctcttgccatagtcttcactccttctttccatttcataccttatatacggaaagaaagaaggaaaggtttcatgtgaaagaaaaaaaccaaagcagggggctttggttttaagcgcgctcttcaaagagcctggcgatttcaacaatgacgtttaccgccttttccatatgatcgacggaaatgtattcatattttccgtggaagttttggccgcccgtgaaaatgttcggtgtcggcagtcccatgtaagagagctgtgagccgtcggttccgccccggatcggttcgataatcggttcgatgtcgaggtttttcatggcttgatacgcgacatcgactatctctttgaccggttcgattttttctctcatgttgtaatattgatcacgcagttcaagcttgatgctttccttgccgtatttggccgccagcgcatcggcggttttctgcatatattcttttcgttctgcgaagcggtctctgtcaaaatctctgatgatgtacgacagggcggcttcagaaacgtctccgtccatggaaagtaaatgatagaagccttcatacccttccgtatattccggcgcttcttctttcggcagcgcgtgatgaaattccatcgcgatttttgaagcgttgaccattttgtttttcgccgttcccgggtggacgctttttccgtaacaagtaagctttgcggcggctgcgttaaagctttcatattgcagttcgccgagggggcctccgtctatcgtgtaggcgaacgcggcgttgaagcggccgacatcgaatttgtgagggcctctgccgatttcttcatcaggcgtgaacgcgacccggatcgttccgtgcttgatgtccggatgtttgatcaagtacgccattgccgtcatgatttcggcaatgcccgctttgttgtcggctccgagcagcgtcgtgccgtctgttgtaatcagcgtctggcctttatagcgggaaagttccgggaattgctcaggcgacaggacgacattgagtttgtcattcagaacgatatcatgcccgtcgtagctttcaataatctgaggattcacattttttccggtaaaatcggtcgcggtatccacgtgagccagaaaaccgacagtcggcacgtctttatccgtattcgccggcagagtcgccatgacgtacccgttgtcatcgactgtaatttctgtcatgccgatcgactttaattcatctgccagcatgttggccaatgtcagctggccgggggttgaagggcagttttcattgttttcgtcagactgtgtatcgacttttacgtaagaggtaaagcgttcaatgatttcatttttcataccgtcatctcctttgtcttatcttaccatgcgcgggggagggatttctatttcacaacccgtttgaatcgagggctctgttttttacgcgaatgaaaataaattatgaagaaacgatgactaaacgattaaactttttggaaatggatgattgaggaagaaaaaaccgatataatatggtcaattcattcaataggggaggctttcttcatggcgattttagtgacaggcggagcgggttatatcggaagccacacatgtgtcgagctgttaaacggcggctatgacatcgtggttctggataatctgtcaaacagttcaccggaagcattggagcgtgtgaaagacattaccggaaaagggcttgtgttttatgaagcggatctccttgaccgtgccgccgttcaccgggtgtttgctgaaaatgagattgaagccgtcattcattttgcgggattaaaagccgtcggtgagtctgtggctgttccgctccgttattatcataataatctgacgggaacgtttattttatgtgaagccatgcaggcacacggtgtgaaaaaaatcgtcttcagttcttcagcgacggtttacggcgttccggaaacaacgccgatcactgaggattttcctttaagcgccaccaatccttacgggcagacaaagctgatgctggaacagattttacgcgatctgcataatgcggactctgaatggagcattgcgctgctccgctactttaatccgttcggcgcgcacccgagcggccggatcggagaagacccgaacggcatcccgaataatttaatgccgtacgtcgcacaagtcgctgtgggcaagcttgagcgattgcaggtgttcggcaatgattatccgacaaaggacggcaccggcgtgcgggattacatccatgtcgttgaccttgccgagggccatgtcaaagcgctcgaaaaggtgctgaacacaacgggcgccgacgcctataatctcggcacaggaagaggctacagcgttctggagatggtcaaggcgtttgaaaaagtatcaggaaaagaagtgccgtaccgttttgccgaccggcgcccgggagacatcgccgcatgcttcgcagacccggcaaaagcgaaggctgaattaggctgggaagcaaagcgcgggcttgaagaaatgtgcgccgactcttggaagtggcagtcctccaatgtgaacgggtaccaaaaggtgtaaaaagaaagagaccttcaaatgatgagggtctcttttgttatgatgattatttaattttcacttcaacatcgttgctgaactttaatttccaagtgcctttagagtatgcgtttttatccacttcaaaagcttttacgtcagtcactttaatgttcgggttcaagtcacttaaaattttactgttgtctacttttgtttctgttgcatagcttgaagaagcatcaatatctgaatcataagatgttcctttagaatctactaatttcgctcttggaatggagaaagagcttaacggcttgtttgaaacatttttaaccgtgtattgaacagctacgataacgccgccgtcagacgcttttttctcgacaaattgagagcctactgaatctcttttttccactttcgtaacagtaacttcagttttctcagtcttaacagtgtcaccgatgttatacagtttttctttagattccgcagcttttgaagacgcagttttagatgacgaagaaccgcctccgccgccgatgtttacgagaatgataataaccaccactgccagaagcaatgtgatgattttatgtctcatgaaaaagtttctctgatctttaccgcagtttgggcattttttaacgcctttagcgatttctttgccgcatgccttacaagacaccaggttgcctgccataatatttcctcctatgtaaactatttcttaaaaactacatactataatgcctgtaaaataacctatagtcaataatattttgagaaaaaaagtattttaatgattttttagtcatgtattttaaggtcctttttagtatcggcagatcgttcgcattttccataggtttaatgaaaaaagagtggttgaacatgttcgtgatttcccgtataatcttgaaagataatataaaaactgaacataaaaaacagtggttttctagggttccgcaatgctgaattggtctggaccgagagaaaacacacagcaggttcctgctgtgacacgttgggataaaagcccgggagtttctgctcttttaatgaagagtgctctcccgggcttttttgattttataaaaaagggagtgtctgggatgaaaaagagattgctggatgtgctgatgctgattattggagcttttatctttgctttggccgttaatttattcgccattccgaatgatcttggagagggcggggtaacgggaatcaccctgatcttgtactatgtgtttgaatggtcgcccggggtgacgaatatcattttgaacgggattttattgattatcggatataaatttttagacggaaaaacaacgctttatacgatcattaccgttgtcgccaactcactgtttctgcatctgacgcatgattggcactcgccttcacatgaactcattattaatactatttttgcgggtgtgtttgccggtgtcggaatcgggatcattattcgagtcggtggcacgactgcgggttctgccattttggcgaggattgcgaacaaatatctcgattggaatatcagctatgcgcttttgttctttgatctgattgtcgtcttcagttcttatttcatcatcggtgcggaaaaaatgatgtttaccattgttatgctgtacatcggaacgaaggtgatggactttatcattgaaggcctgaatacgaaaaaagcggtgacaattatatctgagcataagcacgaaatcgctgaacaggtcaacacgctgatggacagaggggttacgctgctgtcgggtaaaggaaattacacggggcagtcgaaggaaattttatatatcgtcatccagaaacaagagctttccatgctcaaaaaaattattaaaagctgtgatacaaaagcgtttgtcattgttcatgatgtgcgtgatgtctttggtgaaggcttcgtcgatatctctaaataaaaaggatccctctgccggcgcggagggtttttttcttatgccggcagaagcggttatatccgtttcccgggaaatagcctgaaagctgtttcttaaaacgaagtggatacaatcggccggacgttttatactgaaaatatgatagagcgatagaaaggagcgcatatgaacccgttattggcaatttacccgagggctgtgttgtctgatacgtgctgtacggcggaggatgtcttttgcttttatgatgagaaaaggcgggtctatgtcgccattccgaaggaggatatcaccccgaaggagaaactgcttctggaatcatttttgacgcccgctgaagaaaaaggcgttttttttccggagacggcggcagcaaagaggtggcggcgttttctgctggaagaaggtccggtgcctgatgtcaaggagccgcgtgtccgttttatccattatgacttattgggagaacgggactggggggcattcacagaagcgctgcgccatttctggccggtttcatatacagttgtccggacggggagggatcatggcgtgattgtggaggaagaaaagctggaagcgccagattcggatgacatcgcatcttttgtgaagattctcgaaggcgatttttatttcagtgtccgttttttcgtcggaaggtattactgcaagggggaacgtctgcgccttcattatcagagagaacagcaatattgtcagatcggccggcgtcatctcccgcagctgagcacgctgaccgcggaaacggtatttccggccatgctcacggaggaaagcagagaaaagctctcagccttgcttcacgaagaagcggcgctgctgtttcagaaagaaccggagctgaagcatacgattcagacttttattgaacataactcaaacatgtcgctcacatcgaaaaaactgcatttgcaccgcaacagtcttcaatatcggattgataaatttgcggaacgctcaggtattgatattaagacatatcggggcgccctgctggcttatttcatttgtctgcaatatgaaaaatcacattaaatgggaaatgtgcacgaagacagcggtctttttttatgaacattgcctatatccgccgccgtctgacgctgttacaatcctatttaagaaagcgtttacaaataaagggggatatacatggcggaacttcggctcgagcatatttataagtattacgatcaaaaagaagcggctgtcgatgattttaaccttcatattaaagataaagagtttatcgtgtttgtcggtccgtcaggttgcggcaagtcgacaactttgcggatggtagccgggctggaagacattacgaagggcgatttctatatcggtgacacgagagtgaatgacatcgctcctaaagacagggatatcgccatggtgtttcaaaactatgcgttatatccgcacatgacggtctatgataatatcgcattcggtctgaagctgaggaagatgccgaaaccggagattaaaaaacgtgtcgaagaagcggcgaaaatgctggggctcacagagtatctgcaccgcaaaccgaaggcgctctccggcggacagcgtcagcgggttgcattagggcgggcgattgtcagggacgccaaagtgttcttaatggatgagccgctgtcaaatctggacgcaaagcttcgggtgcagatgcgggcagaaattattaagctccaccaaaggctgcaaacaaccacaatctatgtgacgcacgaccaaacagaagcactgacgatggcgacacgcatcgtagtcatgaaggacggaaaaattcagcagatcggcaccccgaaagaagtgtatgaacatcccgaaaacgtatttgtcggcgggttcatcggttctccggcgatgaactttttcaaaggaaagctgacggacggcgccattcagatcggttcagccgctctcagcgtgccggaagggaaaatgaaaatgctccgggaaaaagggtatgccggcaaagatatcatcttcggcatccgcccggaagacatacatgacgagctgattgtggtagaatcttataagaattcatccatcacagctaaaatcaatgtcgcggaattgcttgggtcagaaattatggtttattcccggatcggggatcaggattttatcgcccggattgacgcccgccatgacattcgtgccggtgaggaattgaccgtcgctttcgacatgaataaggctcacttttttgacagtgaaacagaaatcagaatccgctcataacgcaaagccggacagctggatgtccggtttttttgatgtaacaatttatgacgcataaccgatataaaaagtaaatagaagacagaaagcaggaaaacgatgaaacgcatgatcatgtgcatgtgccttttggctgccgtgtttacacttgccgcctgctcgggtcatgaggcaagcgccgaacaaagcattccgaaggcagaagcgcacagcgaaaaaaagtccgtaaagcggcaaatcaaaaaagagccggatacgtccgcctgggttcaaacgaaagggatggcgagactgccgattctgatgtatcacagcatttcagagggaaacagcctgcgtgtgccgaaggaagaattccggcagcatatgaagtggcttcatgatcacggctattatacgatgactcctgaagaggcctatctgatgctgacggaggataaggagccgcgtgaaaaatgtgttctggtcacatttgatgacggctatacagacaatgtgaaagcggcctatcccattttaaagaaatacaagatgaaagcgacaatctttatgatcggaaactttatcgggcataagaatcatctgactgagaagcagatgaaggagatggccgcccacggcatttccattcagagccatacgatgaaccatctcgaattgaacgggctcacaccgcagcagcagcgacgtgaaatgaaggactctaagcgtttatttgatcaaatgttcgggcagcggacgtctatgatcagctaccctgtcggacgatataataaagaaacattaaaagccgccgcctcgtcaggctaccgtatggcggtcacgacggagccgggagcggcgtctagagatcaggggctttacgggcttcaccgcgtccgtgtgtcgccgggcatgtccggcgcggcattcggctcttatattcaaaatgtgatgaaataacagagcctccgcatatgcggaggctttttttcagtttaatagaattgatgaagcagcagaagggtgacgctcacggtaatcgctccgccgattctggtcgacacttgggcgaacggcataagctcaagccgttcagcggcgctcaagatcgcgacgtcgccggtgccgccctggccggaatggcaggcattaataaccgccgtttcaatcgggtacagattcagccattttccggtcagaaaaccgacggccatcatcgtgacgacgattgataaaatggtaatgatgttgctgattgtaaacgccgcaatcagcttgtcccacggtgtcattgaaacgccgatcgcaaataagagcggataggtcacggctgtcgagaaaaagcgcgagacgccgaaggctccgttttcaatcgaagccggcgccagcctgaacagcttaatgagaacggcaaggacgagcatcacgactggagccggaagctgaaagaaatcatgcgccagcatgccgaccaaataaagggaaaccgctaaaataccgcccgaagcgaaaaaggacaaatcaaacgttttatcatcggccggctgttccaatgcgggagcggaatgatcagacttatcaaccttcccgttgcccgtccattccggtttgcgtttcccgatgacattcagcaaacccgataacataatggcgcacaggctgccgagcatgatggacggcagcacaagcgcaaaggcgtctccctgggacatcggcataatatcggagtagccgatggataaaggaatcgcgccttcaccgacaccccccgccataatcggaacgacgatataaagcagcgtgtgctgaaagccgagcccgagcagcgtcccgacgcataagccgacgatggcggccgcgatagacccggcgatcagcggaataaaaatcttaacgaaagctttgacgagcgtctctcttttcatcccgagaatactgccgacgacgataccggcaataaatagatagagaaagttggagctttccgtgaattctgttgttgaagtaataatgtctttcggaagcaggtggtagtagacgacagcggatggaataaaggttgcgagaatcgcagggccgccgatggaccgcacgatcggaatggattttccgatctggccgaaggtaaatccgaaaaaactcatgacggcaattgatgtcagaatgtcgctttttacatcacggctcatgacaaacaccgtaataagcaagaaaagcaggatatagataggaagaggaataatgccgattcttatattcattgctctggcaaaccagttatcagtccgttcctgtttttggattgaatccgtttgcaattttggttgaagttctcccatgcttgttcccccagtcgttatgtagtgaaaaaatatccccatttaaagtatactaaaaaatttaaattgttcatatattatgaatttactagaggacatgctttcttcacattttctttctcaaaatggcgatttggcgggctttttcaccgagaaaagcattttgttcgccacacgaataaaaaagaggtacgatatcaaagggacaaatatcctaggtgctgacataaaatctctacaaatccgacaataatcagtcacaatttcagcctgattttaggtatattgatctttttttttgggctgaatcgttgtaaagtaatgatattgaatcatttctatgacagccgctgtcccccagggtgtacaggctgatatttcaatagttttgacgaatttgtgaaacattgagcaaatatatcattttttgtgaaataccgagcaatgatttcactatgtttgtgaaatgttgagcaatttaccagattggaggaaaaacatcatgagtgagttggtattagcccgcattcaatttgcatctacaacattgtttcacttcttgtttgtgcctatgtctatcgggcttgtgtttatggttgctttgatggagacgctttatgttgtcaaaaaacaagagacctatctcaaaatggctaaattttgggggcatctctttttaattaactttgctgtcggcgtcgtcacagggattcttcaggaattccagttcggattgaactggtctgattattcccgttttgtcggggacgtatttggggctccgcttgcgattgaagcgcttttggcgttttttatggagtctatttttatcggattatggattttcggctgggaccgtttatctaaaaaagtgcatttgctttgcatttggcttgtatccttcggaacgattatgtcatctttctggattttgacggcaaactcattcatgcaggagccggtcggctttacgattaaaaacggccgcgcggaaatgaatgacttcggagcgcttttgacaaaccctcagctttgggttgaattccctcacgtcattttcggagcgcttgcgacgggtgctttctttatcgccggtgtcagcgcatttaaattattgaagaaaaaagaagtgcctttcttccataaatctttcaagctttcgatgattgtcggtctgatcgccggtatcggcgttgcgttcagcggacacatgcaggctgagcatttaatggaatcgcagccgatgaaaatggccgccagtgaagcgctttgggatgacagcggtgatcctgccgcgtggacggcttttgcgaatattgatacgaataaagaaaaaaacacatcagaaatttcaattccttacgcactgagctacttggcttaccagaagttcagcggcagtgtgaaagggatgaaaacacttcaaaaagaatatgaaaaaacgtacggaaaaggcgactatatcccgcctgttaaaacgacgttctggagtttccgcattatggcgggagcgggtgcgcttatgatttttgccgcgattgcaggctttattctgaaccgccgcaaaaagcttcatacgagcaagtggtatttacggggcatgatcgcactgatcgcattcccgttcattgcgaactctgccggatggattatgactgaaatcggccgccagccgtggacggttatggggcaaatgacaaccgcacaatccgtttcgcctaacgtaacgacgggatctctgctgttttcaattatcggtttcggcgtcatgtacttgattttaggcgcgctgcttgtcttcctattcgttcgtgaaattaaaaaaggtgcggaccatgatgatcacaaggatgttcctgtatcaacggatccgttcagtcaggaggtctaccatggggtcacttcatgatctttggtttgtactcgtttcagttttgtttgtcggatttttctttttagaaggttttgatttcggtgtcggcatttcgacccgatttcttggccataatgaattagaacgcagagtgctgattaacaccatcggcccgttctgggatgcgaatgaggtatggctgctgacaggtacgggagcgatcttcgcggcattcccgaactggtatgcgacgatgctgagcggatattatattccgtttatcatcatccttcttgctttaatgggccgcggggtggcgtttgaattccgcggaaaagtgaatcatttaaaatgggtcaaaacatgggactgggtgattttcttcggcagccttatcccgccgtttgtattcggccttatcttcacaagcttgttccgcggcatgccgattgacggccatatgaatatgcatgcgggtttctcagatattgtgaacgtgtattccgtccttggcggagcagccgtcacccttctttcattcctgcacggtttaatgtttgtcacactgcgcacgatcggtgatttacaagagcgtgcgagaaaaatggcaaaacgcgtaatcggtgttatctttcttgttgtacttgctttctttgcgatgtctgcatacgatacggatatgtttacacgccgggcaaacatcacgattccggtattcgtgctgattgtcatctgcaacgttcttgctgttgtgttcatgagcaagaaaaaagacggctgggcattcggtatgaccggcgcgggtcttgctttgacagttgcgatgatttttatctctctgttccctcgcgtcatggtcagctcgctgaaaagcgcgtatgacttaacagtagctaacgcgtcttccggtgattattcacttaaggtcatgacaattgttgcactgactctgctgccgtttgtcatcggcagtcagatctggagctattatgtcttccggaaacgcgtcagccataaggagcctatgacttattaatgggaaaagacctgtttctttataaaggaatgaagcggattcttgcgatcattacgggattaacgattatacaaacggccgccatcatcttgcaggcggaatggctgagccaggcggtaaccggattatttaacgggaagcggattgcttctctttatccggttatcggctttttcctgcttgcgtttttggtccggcatgcggtaaccgcggtccggcagaaaatcgtgtaccaatatgccgcgcaaaccggcgcagacttaagaaaaagatttcttgagcaattgttccgtctcggcccccgctttgcgaaaaaagaggggacgggccggatggtgacgctggcgatggaaggcatcagccagttccgccgttatttagagctgtttctgccgaaaatggtcagcatggcgattgtgccggcggccgttgttatttacgtgttttttcaggataaaacatcggctttgattctgattcttgcgcttccgattttgattgtatttatgatcctgctcggacttgtcgcacagaaaaaagccgatcgccaatggaagtcctatcagacgctttccaatcatttcgtggattcgctccgcggactggagacattgcggtttttagggttaagcaaatcacacagtaaaaacatctttcatgtcagtgagagataccgcaaggcgacgatgagcacgctccgggtcgcgtttttatcatcattcgccctggatttctttacgatgctgtcggtggcgacagtggctgtgtttctcggcctgcggctgatagacggacaaattctgctcggtccggcattgacagcgctgattctcgcgcctgaatattttctcccggtccgcgaagtgggaaatgattaccacgcgacgttaaacgggcaggaggcggggaaaaccattcaagcgattttggcgcagcccggttttaaagaagaaaagccgctcgaacttgatacgtggactgacggggatgaattacagcttacgcgtttgtccgtccgagaatcgatgtctgaatttcatctgtcctttaaagggaagaagaaaatcggaattatcggggaaagcggtgcgggaaaatcgacactcattgatgtgctgggcggctttttagagcctgcgtccggtgagatcaaggtaaacggtgaatcccgctcgcatctgcagtcagacggctggcagaagcagctgctttatatcccgcagcatccgtacatttttgatgacacgcttatgaataatatccggttttatcatcctgatgcttcccgtgaggaaacggcgcgcgctgctgattcagcgggtctttccggactgatccgcgatctgcccggcggccttgacggccggatcggcgagggcggacgggcgctcagcggagggcaggctcagcgtgtcgcgctggccagagcctttttaggaaaccggccgattctccttttggatgagccgaccgctcaccttgatattgaaacagaatatgaaataaaagaaacgatgaaagacctgtttgaaaacaaacttgtctttctggccactcaccgtcttcactggatgcttgagatggacgaaattatcgtgcttgatgacggcgcggtggcggaaatcggcacccacgacgaattgatggcgaaacaaggcgtatatgccaaacttgtaaaggcgcaactgggggaaagaacatgagaaaagaagaatggattctgccgtatataaagcaaaatgcccgtttgtttgttcttgtgatttttttaggcgcggtgacgattttttcggcggcctttctcatgttcacttccggttttttgatctctaagtcggcgacaaggcctgagaatatcctgctggtgtacgttccgattgtggccgtgcgcaccttcgggattgcccgttcagtctcacggtacgccgagcgcctgacggggcaccatatcattttgaaaatcgtgtccgatatgagggtgcggctttacaatatgctggagccggcctcgctcatgctttcatcccgttttcggacgggcgacatgctcggcattttggctgaggatattgagcatttgcaggatgcgtttttaaaaacgattttcccggcggtttccgctttgctgctgtatgcggcatccgttatcggactcggctttttttcctggccgtttgccgcttttgcggcgatttacctgtttatattggttgtattgtttccggttgtgtcgcttcttgtgacgagagcgaaaaacatgaggctgaaaagcggccggaatacgctctacagccggctgacagatgccgtgctcggcgtgagcgactggatgttctcgggacgacaggcggcctttatttcctcttatgaagagaaagagaaggcatggtttgaccttgaaagcaaacgtcagcggtttacgagatggcgtgatctcgccgcgcaatgccttgtcggcggcttcatattgatcatgctgttctggacggcgggtcagtatgcggacggcagcatcgccaacacgatgatcgcagcctttgtgcttgtcgtatttccattgacggaggcgtttctgcccctttcggatgcgctgacggaagtgccttcttatcaggattccatcaaaagaatgagtaaggcggctccggagctgcgaagtcgtgaggtgaagcagacagatgagatactggatgtatccgatgtgacacttacatttgataacgtgacgttttcttatgatcagcacagtcatgtgcttgaccgtttttccttcactctccgccagggggaaaaaatggcgctgctcggcaggagcggctccggtaagtcgacctctctcgctttaattgaaggcgccttagttcccgattcgggcaaggtgatgctgaacgggctggaaactgcggccgtgcaggagcagatttcctcagcggtggccgttttgaatcagaaacctcatctctttaacacgagcattatgaacaatatccggctcggaaacggcaaggcgagtgatgaagatgttaagcgtgcggctcggcaagtgaagctgcatgattatattgaatcactgcctgacggatatgaaacgtccgtgcaggagacggggattcgtttctcaggcggggaacggcagcggatcgcgcttgcccgtattctgctccaagacacgccggtcattatccttgatgaaccgacgatcggccttgatgcggtcactgaacgagaattgcttgatacgatttttgatgtctttaaagagaaaacgatcctctggattacacaccatttagcgggtgtggaaacagctgataaaatcgtctttttagaaaatggaaaagcagaaatggaaggaacccatcaagagctgcttgcagaaaacgaacggtaccggaagctttaccgtcttgatgttccgatcagaacataaacagccgcaaacgagcggctgtttttttgtgcggtttaaaatctcttcttgtttggaatataaataggagacagaagaggaggtacagagatgaatataatggattggacggaacaggatgtgaaagatacgctgccgaaacgggaggcggacagccataaaggcacgttcgggacggcgttattgctggccgggagcgatgacatgccgggagccgcccttctagccggattgggtgcgatgagaagcggtgtcggcaagctcgtcatcggtacatcggcaggcgtcattccgcttatcgtcccggtgctgccggaagccacgtactggcgggacgggtggataaaagccgcggcgggccagcccggggaaaccatccgggccgctgccatcgggccgggccttccccaaacagacgaggtgcagcaggcggctgatcagctgctttctggcgattatcccgtcatactggatgcgggcgccattacgaaaagaacctatccgaagaggaaagctcccgtgatcttgacgcctcatcccggcgaattttccagaatgacaggccttccgattcaagagattcagcagaacagagcggaatatgccgcggaatgggcggagcggcttcatgtcacgattgtcctgaaaggaaacgaaaccattatcgcttttcccgacggggaatgccgcaggaatacaaccggaaacggcgcgcttgcaaaaggcgggaccggcgacacgctgtcgggaatgattctcggcatgctgtgctgtcatcaagacccgaagcacgccgtattgaacgccgtccgccttcacggcgaatgtgcggaattatggacgaaagagcgctccgcccataccttattggcgcacgaactttctgaactgctgccgggtgtatggaaggaatatgaataaagaaaaggcgtcttcatagggaaggcgcctctttttgttttaaccttgatttcatcaggacataatacagcagcgacggaacggccaggccgatgacccaggcaatgtcgcctccgccgaatatttcagcgagcggcccgatgtaaaaggatgtattgatgaacgggatttctaatataatcgacaaaacgaaggcggccgctgtaatccaattgaccctgccgtattgtccgttgacgtcaaacatcgatttgacgtggtattttccgcggcggataaaatagtaatccacgaggttgatcgccgtccatggaattaagaaataactgatgaaaaagatgaaatttaaaaacagttccatgaaattgctttggcccaagagacttaatacagtacccgctgccgtcacacaaaggatcattaccactctcgttttcggcgtcaccttcagttttaaaaacggctccaaggtagtcgtggttgacataaaggctccgtataaattaaagacgttgatcgccatttgcccgaacaggacgatgatcagcataataaaggaaaacggaccgaacaatcggacaatctcatttcccgcattagcggtaaattccgggagcgccgtcgtcaaaatggcgccgagaagcatcatccagatggaactgactgacgtacctgcatagctgtaccaaaaagtatgcgatgccggtgttttgaccggcagataacgggaataatctgcgacatatggcgcgtatgccagctgccatgtggccaccgcgctgaccgccactagaaaaacaggcagatctaatgagccgggcacccagcttcctgaaggaatcggcagttgaaaaataagaatcgttgcagcaaaaaaaacggcaaaggaggtccaagagaggattttctgcattttgtgaatcagatcatgaccgtagatcgtgagtaaaaaacagatggcgcttaagccgataatacaccatgaagccggaatcgggacaaagctgctcagtgtaccggctgcgagaatcgtactgctcgcaaagaagcccaggtagataaacatgaccaaaaagagggcagaatcgctccgatcacgccgaattgcgcgcggctttgaatcatttgcggaattccgagctgaggtccttgtgcggaatgagacgccataaagattgcgccgataaaggttccgatcacaatggcggcgatactccaaaagagatcgagtcccattgtaacgggcagtgtgcctgtgactaacgtcgtaatatgcatattagccccgaaccagacggggaataaatctttagcctttccgtgtctttcgtcatgcggaatatgttcaatcgttcgcctttctactttcaatagataatctcctccgtatgttcttctttaacataaagacatagcttaacagattgacctgccgtttacaaattccagcatgcaggaaaaacattgtaaagcctcgctgacagccgttcaaagttttttgaaaaacggaacaaacactgccgcctaaacgatttaccagggattaaaaggtatggatatgcttactgactaatatgtatgaaggagaaatgtgtcaatcttttgacgaatggagccattattcgttaagctgaaagaatagtttactttgtgtaaatttcattaatgaaaaggggattgatgatatgtgtacaagtcttacattgaaaacgacagacggcaatcacctattggcgcgaacgatggattttgcatttcagctcggtacggacgtcgtgctttaccctcgtcagtacagctggaaaagcgaagctgacggcaggatgcataagacgaaatacgcatttatcggcatggggagaaatctcggcaatgttctgtttgccgacggcgtaaatgaaaaagggctgtcgtgtgcgacgctgtattttccgggctttgcgggatacgagaaagcggaacgggagggcacctgtcacatcgctcctcatgagtttgtcacctgggccttatcaaactgtgaatctcttgaagacataaaggaaaagctctcaatgctgacgattgtagagaagaagttaatgttattggatacggtgctgcctcttcattggattttatcagaccgcacgggcggctgcattgtcatcgagccgacaccggagggaatgaaagtatatgacaacaaacccggagtgatgaccaacagtccggaatttccttggcatgtgaccaatctgcgccattatatcggaatcaggccgcagcagtcagaaagcaaaacattgggcggaatgacattaaccgctttcggccaaggatctggaacgatcgggcttcccggtgattacacgccgccatcccggttcatcagagccgcttatctgaaagagcatttagagcctgccgctcatgaaacggatggcgttacggccgcttttcacgtgctgtccaatgtgaatattccaaaaggcgcggtgatcacagaggagaatgaaattgattatacgcaatatacgtcggtcatgtgctgtgacaccgggaactactactttcatctgtacgacaaccggcagattcacaaagtaagtttattccatgaagatcttgaccgtccggagccgaaagtatttgcggccgcggcggagcagaatatacaggagctgaattagctcaaaaaaaaaacaggacgcgattgtcctgtttttttatttaatacggatcagacggatggctttcctgttcagcctgttttgcggcttgtgctgtatcagtagtgccgatcggcccgccgctgctgctttcggaggcttttttcagcccttccgcaacacgttttccgtagtccggatctgcttttgtgaaattctcaatcatttgatcctgaatgtctttccggcaggaagaaagcgtattgaccaggtttgtgatcaattcggtccgttcaaattccgaaaatctgcggtatgtttcaccggcctggccgaagttattcggccggtcgatcgcttcccgcttcacatcgccttcgacatgaggtgtatggtctttcccatcctgctttgcttcggtgagtcctcccataatggacggctcatagttgacgtgcgggttttgtccttctgcccgatcgacccgatactgcatttgcccgccttcctggttggtggcgacatgctttttcggcgagttgatcgggagctgcaggtaatttgcgccgacgcggtaccgctgggtatctgaataggcgaatgtccgtccctgaagtaatttgtcatctgaaaaatcaaggccgtccacaagcacgcccgttccgaatgatgcttgttccacctcggcatggtagttttccgggtttttgttcagaaccaatttgccgatcggcttccaagggaaatcgtctttataccacagcttggtcggatcaagcggatcaaaatccagctcgggatgctcgtcatcagtcatgatttgcgcatacacttcccattcagggtaatcgcctttttcaatcgcctcatacaaatcctgtgtcgcatggttaaagtttttcccctgaatctcttccgcttccttctgtgtcaggttgcgtatgccctgtttcggttcaaagtgatatttgacgagcacggcttttccttcttcattgacccatttgtaggcatggacgcctgagccctgcatctgccggtagttggccgggatgccccacggcgaaaacaagaaagtgatcatatgagtcgcttccggtgattgggaaatgaagtcgaaaatacgctcgccgtcctgaatgttcgtaacgggatcaggctgaaatgcgtgcacaagatccgggaacttcagcggatcacggataaaaaagattttcaggttgttgccgaccagatcccagttgccgtcttcggtataaagcttaacggcaaaaccccggggatcacgcaatgtttccggggaatgcttcccgtggttgacggtagagaaccgcacaaacgccggagttttcgttcctttcttttgaaacactttcgctcttgtatatttagaaatctcctcgtctccaaaacttccgtacgcctcaaagtatccgtgtgcgccggcgccgcgcgcgtgaacgacgcgctcgggaatccgttcgcggtcaaagtggctgattttctccaaaaaatcataattctccaatgtcgtcggtcctctattgccgactgtcctgacattctggttgtcagtgaccggatggccctgccggtttgtcagcgtgtcttctgactcgcctttaccggtcgtcttactggaaagcgtttcttcgctgtttttgttattttccattgttgaaccctcctttttgaacggtaacaatatgcccagcagagccgttttttaaaaccgattttcaaaagaagcggttattccgcgatcggcgtcaaggacccgccgttccatatttcgcccttgttcagcgtccagctgttttgataaaggctttgcgcgccttgattggccgccggacttaattgttcatcccatgtcaaaaagtacgcggtctgagggtatttttgcctgatcgcattaataaaagcagcataatcaaagcttccgatattgccggacggaccggtttcggcaaaggcaaacggttttttcagagacagcatttcatcatagcctgatatcgcatacggatcagtgaagtaagcgtccagaccggtaatatccacataagatgagcctgggtagaagtctgttttaaagtctctgttggcatccggcgaatacacccacaaaaggttatccaatcctcttgtctctgtcatatagcggtatatcttcttgtaaagctctttgtacagcgagattctctcattgtctttttggttgtagcctgtcagcccccaccagaaccactcgccgttcatttcatgcagcggtctgaacagaacggtgacgccttgatttttcagctgagtaaggccgtcggcaattttgctgagcagcgcctcaagccgttttccttccacagttgaagggtcaaggatgtttttgtactggctgtttgagatggccgttttatagtttccggatggaaaggccggatttgcgagatgcaggctgacctgagggaggccgccgcttttccagtatgagattaagctgctgttgcagctgtaatcgatagtatcggtgatatccgctgtttccagccaccctctcccatagtcacagccgtagatggcgggagactgtcccgtcgcgtttttcaagcggttttcctctgtcattgaaaaagtgacatcactgtacccgccgaacgctccggacatgaccctgttttctgaacggttgggcaggtgggccagccagttcatgatatcttttgtcgtctgctgggcatttgggttgacgggataaacggtgtgagccgatatcggactggcggctcctaagagtaataaaacgatagacaggcagactgctaactttttaagcatataaaagacctcctgatttttaagatgatgaaggatgtgaaacgataacctcacaatctccttctataacaaaatctccggaatccgccggcacgataaagtgatcgcctttctgaacggggcatccatccagttctccgcgccctttaatgacgcttgcgagtaaataccggccgggtgcggggaatgatgctttcccgctcacatcccattgataaactgaaaagaaaggtgtttcggcgagtatcgtaataagagcatctccgatccgatgcttagtgctttttacattttcatcggtatggggaatgtctgttacgtcaattgctttctcaagatgaagctcgcgtttattcccgttcccatccgtccggtcatagtcgtaaagccggtaggtggcatcagagctttgctggatttcaaggacgagcgtaccttcacataaagcgtgcagtgtgccgctcgggacatagaaaaagtcgccgggcttaatggggatgcggcggagcaggtgatcccactcgtttcgttcaatgagccgaacgaaatcttcttttgtttgggcgcggtgccctaaaatgagctccgcgtcttttttgcagtccaacacgtaccagcattccgtttttccgagttctccgttttcatgccgatgtgcatatgcgtcatccggatgaacctgcacggataagtccatatttgcgtcaagaatttttgtgagcaggggaaaagcttcttctttcggatgtccgaacaggtcagggtgttcattccagagacggtgtaatgatgttccggaaaatggcccgttccgcacgatggatgtaccgtgcggatgagctgaaatcgcccagcactctcccgtccgctcagaaggaatctcatacccgaatgtatcgcgcagcttcgtcccgccccataatctttctttaaaaaccggttccaaaaataagagtttcgtcattttcccgcctcccggtttgccgtctctaatgcgcgctccgccaatacgagcgaaccggccgcgccggagtgaatccctaattgagggggaccgatgaagtgttcaatgtcgggcagatcaatatattgattcagccgctttttcacgtgctgacggatataagagaacagctgatgctgcttcatgacgcccccgccgagaatgatcttttccggcgaaagtatgagaatatactgcacaagcgcttcggcaatataatagccttcaagctcccacacttcctgctgatccgccagcagatatgcttttttcccccagcgtttctcaatggcgggacctgccgcgaggccttccaggcaatctgtatggtaagggcaattgcctttgtagccgtcgtccgggtgtcttctgacataaatgtggcccatttcaggatgagacagcccttgaacaaatctgccgttcatgatggcgcccgctccgatgccagtgccgaccgtcaaatagaggcagctgtccgcgtttttggccgcgccgaaagaagcttctccgagcgccgccgcattaacgtcggtggtgaagcctgcgggaatatgcagtgcgcttttgatcgtttgaagaatagggcagttccgccaggctgtcttcggcgtcgcggtgatgcacccgtatgtttgactgtcggggcggatgtcaatcggtccgaacgacccgatgccgatggcttctatcgggaaatctttaaagtaacggatgacttgtctgagtgtgtcatccggttctcccgtcggaaactccgccctgtccagaatggtgccgtctttttgtccggcggcacagacaaatttcgtgccgccggcttcaatacctccaagcatggctgtacctcctcatctgttaaaatccgttttgatcggaaacggctttgaaccagcggccgctttttttgacggtccgttcgcccccgttttccagattgacagatacaaagccgtagcggtttttataagcatttgtccaagaccagttgtccataaaagtccacaggtgatagccttttacatttgaaccttctccgatggcccgatgcacccatttgagatgttcccggataaattcaatcctgtaatcatcctgaatgatgccgttttcatcgcggaagcgttcctcgccttcaactcccatgccgttctcggaaataaaacattcgatatttccgtaatgttctctgagattggtgagaatgtcatagattcctttttcgtatatttcccacccgcggtgtgggttcattttccgtccgggcataacatacggatcgaagaaacgctcaggcaggaaaggggcgtgcggattcggaacatgttcttttgccttgacgcgtctcggctggtagtagttcacgcctaagaggtcaaccgtatgctcctgaatgaggcggagatcttctttctcgtaacgcggcagaaagccttccgccttgagaatctcgacaagctcctcaggaaattcgccctttacggcgggatctaaaaatgagcggttgaaaaaggcgtcggcaatccgggatgctttcagatcttcagggtgtgagcttctcggataagaaggcgtcagattcagaatgattccgatttgtccgtcctgtttcaattctctgtaggctttgacagcccttgcattcgacagcagggtatggaagccggcctgcaccgcttcttgaaaattaacgtgattcggatagtgaaagtcgtataagtagccgccttcaatcggcacaatcggctcgttgtgagtgaaccattttttcactttgtcaccgaatagcgaaaagcatgttttggcgtaatgttcaaacgcgtcaacggtgtcccggctgacccagccccccttacgctgaagggcgagcggcatgtcaaagtgaaacaaattgacaaacggctcaatgcgatgggcaagcatttcatcgatgacgtcctgataaaacgcgaccgctttctgattgacctcgccagttccgtccggaatcaatcttgaccaggaaatagacagccggaaggagttgtggccgatttctttcatcagccggatatcctccttgtattgatcataaaaacgtgacgtgtcgccggggccgacgccgttaaaaaaacggctcggctctttttcataccagtaatcccatatgttttggctttttccgtctttgtcggcggcgccttctgtttgggtggcggaggcggaagacccccaccagaatccttccggaaaacgatattgaatatttgattcagtcaattgatttctctcccttactgcgattttgattacatactcatgctgtcatcccgtgcttgctgctcggcctcggcttctttttcctttgccatgtttaatttgtccagcgctttaagaaacgggaaccagataataaacacaatacagaggttgaccagctgcataatgccgcccatgacggaattggtcgccataatcccgttaatgaaaagggggacggtccagggcacggtcacgccagtaggagggggcacgatccccgccgacatggccaggtaggtgacgagcgtgacaaccatcggtgcgatcacccacggaatgataatgatcgggttcatcacgatcggcaaaccgaaaataaccggctcattgacgttgaaaatgcccggcgcgagaccgagtttggatatctgtttcatctgtttgcttttcataaaaagcaagatggtgatcactatggccaatgtcattccggttccgcccattccgacggtgtaaatctccataaacggcttagaaataatatggggaatctcttttcccgctgtatacgcagccaaattttcgacctgtaatgtattccagatcgggtccatcacggaattgataatgatctgtccgtgaagtccgaaaaaccataaaatctgaataaagaaaacagcgattaatgtaggaatgatgccgcttccaagtccgacaagcggggcttgaaccgtatgataaatgacatcatgcagattggtgtgaaagatctgggtgacagccgcattgatcaagaggaagacggtaagcgtgataaaagccggaatcaatgcggcgaacgatttagcaacagccggaggaacaccggcaggcatcttaatcgttaagtttctctggacgattcttctgtagatttcacccgacaaaaaagcggttatcatgccgagaaacatcccttttgctccaagccggtcaaccggaatgacgcctgcgaccgctttgcccgtttccggctctaagacgaacggggtgagcagcagaaaagaaaccaatgcaatcgctccgccgaatacggcctccacttcgtagctttttgaaaggtaatagccgatcccgaagacgacaaaaatggacataatccccatcgtcgccgtcgaagcgccgccaaatccggattgaaagacagacagggcggagctgctcatgattttgtttaaaaacggcaggttcgtcagcacgacgaacaccgaaccgaaaatggtcagcggaaacgccagcataaaagcatcccgtaagacttgcaggtagcggttattgtttaatttgcccgcgatcggaacaaggaattggctgattttctcaaacacgtcttcacccccggctttttataaattctttgattgaaataagtcgagcatttctttgacgatctctttcattgagagcgctgacattaagtggtcttcagcatgcataaaaagcagggagacatccgtcttggcgccgccggcttctttttgaatcatctgaaaatggatgtcgtgcgcttttcccagttcttcttcagcctttgtcagaaaggtgtctgactcatctggccggccgtctttataagcgcgtatcgattgaataatacagctgcgggcattgccgctgtgaagaatcagctgaaaactgatctgttcatccgtgtacgtttccatgcttatcgcctcctttatttgttctctatcaaggaaacggcctgttcgtatgcttttttgccgtctcccatgccgtatgccatcatatcaatcacatcaacggtgatgtgaagcgggtccgcctctttctgaagctcgccttttaaaaaactcatctgcgggccgatcagtacgacgtctgcgtctttcatcgcttcttttgctttatcctgtccgactgcccaaatctcggcctcctcaccgatggagctggcgtaattctgcattttcgtcacaagaaggctggtggacatgcctgagctgcaggctaataaaattcttttcatgaggaatcccttctttcataaagttaaaacgttttcatgaatattataatcttttgaaattaaatgtctatacttttaaaatataaaagttttacttttcggatttttgacacaaaaaaaccttttaagattcaacttaaaaggtttttcatctcaagcgagccataacagccataaataaagtccgatcagggtgatgaataacgtcggaatggttaatatcagacctgttttgaaatacattccccaggaaattttcacgtttttccggctcagcacgtggagccataacaatgtcgccagcgacccgatcggcgtgattttcggcccgaggtcagaaccgataacattcgcgtaaatcaatgcttctctcagcagcccgtgagtgtccgttccgttgatggctatggcgtcaatcatcaccgtcggcaggttattcataacggaggagaggatcgcagcgataaaacccattccgagtgtgcccgcaaacaatccgtgatccgccgctttctgaataagctgagaaagaagatccgtcagtccggcattccgcaagccgtacacgacaacatacatgccgacagaaaaaaacacgatggcccacggggcgtccttgatgacttgtttcgcagggacggcggggcttcgctgcgccagaatgagaaaaatgaccgcgatggagccggcaacgaaggaaacgggtatcgacagcagttcgctgacgaaatatccgatcaataaaacggccagcacagcccacgataaccggaaaaggcgttcatccttaatcgcggatgccggatgtttcacaagaccggtgtcataccgtttcggaatgttttttctgaaatagagatacagcaccaaaatgcttgccgccagagaaaaaaggttgggcaccagcatgcgtgttgcatattcaatgtacccgatatgaaagtaatcagcggatacaatattgaccaaattgcttacaacgagcggaagcgaggtggtgtcggcgatgaatcccccggcgataataaacggaaaaaccagcttttcaggtaaattcaaagcccgcaccatcgccagtacgatcggcgtcaaaatgagcgccgctccgtcattggcaaacagggcggagacaacagcccctaagaccgacacatagagaaacatccgcagcccgctgcctttggccgccatggccatatgcagcgcggcccactcaaaaaaaccgatactgtcaagaattaatgaaatgataataatggcgataaaggcgagtgtcgcattccagacgatccccgtcacttccgcgatatcgtgcaggctgactgctccggcgatcaaagcgaggaccgctccgccgcaggcagaccagccgattgatatatgtttcggctgccatatgacaaacacaagtgtcagcacaaaaatcagcgctgataaaaccgcaactcccaagaatatatcccccttaccggcatgtaacagtgacttctttttgccgcaatgtctgtaaaacttcgtccttttcatctatctgctgcagaatcgagcaaaccagcgcgtattccggtccggacggatgaatggcatagtaccgccactggccctcgcgtctttcgcgcacaaggccggcgttctttaatttccgtaagtgctggctgatgccgggctgacttatatgaaaaatagccgtcagctcgcagacacaatattccttatcctccagaagcttcagcatcaaaagcctcgtcgggtcgcttagaagtttgaggcactggctgatcccttcggaacttaaagcattatgccgccgttccatgcgctcactccttttttacactattatataagcagacatttatataagtaaacggcaatataaaaaaagccggtcttgcactttttgcaaaaccggctcatgtttatttttggaacagttttttcgcttcatccattgctaatttatttcccagtgccgaataatcaagccaaggctgatcggcaattttatagacatggtttgctttcacggccttaagccctttccagacagcgcttttttgcaattctttataggcttgctgtgacttgtcgtctctgttaacgaccacgaaaatcgcatctgcgttgtaatcaggcagcacttcttgagaaatgacttcataagggcgggaggtattcatttctttaatgccgtcagccggtttcagcttcagatcgtcaaacagaatcggtcccatcgggcggcgtgtgctgaagacgcgaagctcttttgcgttcacgcggatcgccatgactttggcgtttttccctaattccttattcatcatggatctgacttgttttgtttcatcttcgtaatcttgaataaatgttttcgcttctttttcacggttgacgatttttccgatgtcttttaaatgatcacgccatgtgcctttatcaaggtcgaaaacgtgtgtgtttccgattttcttgtatttagacacatcttttcccgcaaattctttatcaagataaatgttgtctggattcagctcaagtaaagcttccatatccgggtctgaggcaggtccgagttttttcgtgtctttcagctgatttttcacatgagggagaaaatcttttaattctccgcccacgacggaaccggcaggtgtaacgccgagagccagcagatcatttgtcaggtgaatggacatcgaagcgattttatgatcgccggatttcttttttgactccggctgtgatgaatcggattggcaggcagccagtaagaaaatacacatgaaactgatgagcgcaattatttttttcatgggaatactccttgttttatgatttgattttcatgacgagatagagaaaatacggcgcgccgatggctgccgcaaccacgccggccggaatggcgttcggctgaaacaaagaccggccgatggtgtctgccgcgacaagaatgacaaggccgattaatccagcaatcggaataatatgctgatgcatggtgccgacgagccgtcttgccaagtgaggggcggcaaagccgataaagccgattccgccggccatcgcgacgctcgcgcaggacaagccgaccgctatggcgatcagcatgatcctttttctctgcacgtgtgcgccgagccccgccgctgcctggtcaccgagcattaaaatattcaaagaccgggcgttaagccatgcaagcggtgcgagaatgccgatccagggcaaaagcgaccacacgtgaatccaatctctgccccagacgtttcccaccagccagcgggaagcgaaggtataagtttcttcattcaggcgcagcgacataaacaatgtaacggcgctgaagcccgcggaaacggcgatcccgaccaacagcatgcggatcgttaaaaaaccgttcagcctgtcgtacgtaagcactacgatcagcagggcggcgagtgttccgcccgcaaacgtaaacagcgggatgaacatcgacgcctgcgcctccagggaatgaaagaatgtgatatacatcatcaaaccgaaggaagcgccggcatgcagtccgagaatgcccggatcggcaagcggatttcgggatacaccctgcaaaatagcgcctgacacgcctaagccgataccggccagcatcgtcaccagtatccgggggagccggtaatcgaataaaacggttgtgctttgaaacgtgccgtaaccgaacagcgtttttcccacggtgaggggagaaagccggaatgagcccgtgtgcagcccgatcagaataatgcaaacggcgatgaccagcagaacgagacctgccgccgccgctttttttgtttctttctgcactttcatttataagtctctcccttccttgcgggcaatataaagaaagaaagggacaccgacaagtgccaccatgatgcctatcgccaattctctcgggggactgaccgtgcgtgaggccaagtcggccaaaatcaaaagaatcgcgccgagcaacgcggacatcggaataatcagcctgtacgtaacgccgacgatcttgcgggcgatatgaggaatgaccagcccgacaaagccgatcgcgccggcagcggaaacagacacaccggcaagaacgacggcgatcattaatcccgcggcacgcgtcagagccgtgttcacccctaaattcgccgccacgtcatttcccattgagagaagggtgacggaccggcccatgaatgtcgcgagaatgatgaagaccgcaatcacgggaacaaggacttgtaaatgagcccacttgatccccgacaccccgccggcgtaccagaaggccaaatcctggcttaaatcgtaataaatcgctacaccggtactgagtgaatgtaaaagcgcggccacgaccgccccggcaagcgtcacctttaaaggtgtcatgctgccttttcccgccgcactgataaagaaaatcaagccggtgcttgccagtgctcccaaaaatgacatcatcatcagcagggcgtatgacaaatgagggaaaaaagcaaagctgagcgcaacaacaaacatggcgcccgcgtttacgcctaagacacccgaatcggcaagcggatttctcgtgacaccctgcatgagggcgccggctgcggcaaaagcggctcctgtaacggccgcgccgagcactctcggaagacgcaattcatgaatgatctgctggcccgttatgttcggattgtaatcagcaacagccgaccaaaccgtatgtaaagtaatgtctttcgcgccgaatgagacggcgaaaaaaatagaaacaagcagcccgatcaccgcgatcaggaagaaaaccccgttttttaagatgctgatcagacggcttgcggacgtgacagaatcgctcaaaaatcaattcacctacttttatgatcattgtccggcatttattgaatatgagaatcattttcatttgaaccatcatattataccgggccgattttcaaaacgcaatagagtgttcaacaatgatgcccttttttctttcatgtttatattgtaaaaaagaagtgaaaaacgtgaaagaggaaatcgctatattcagaaaggagggaggcaaatggcgggagaaggaaagcctttgccgattgaattttaccagagaccgtcagtggagcttgcccctttattgctcggctgtctccttgtgaaggagacggatgagggaacggcttcaggttatatcgtggaaacggaagcttatatgggagcggatgaccgggcggcgcacagtttcggcaaccggcgcacgaaacggacggaaattatgttccatgaggcgggccgcatttatacatacgtcatgcacactcatacattaatgaacgtcgtcgcctcggacatcggcattccgcaggccgtgttaatcagggcggcggagcctcatgaaggacagttcctgatggagagcaggagaccgggcagacccccgagagagtggacaaacggcccgggaaaactgacgaaggcgatgggcatttcaatgaacgactacggcggcatgatcacggaaccgccgctgtatattacggagggctttacgcctgaacatatatcaacaggcccgagaatcgggattgacaacagcggagaagcccgggattatccgtggcgctattgggtgacggggaaccggtatgtctcacgctgaccatgtttataaacgctgataacaggggaaagacaaggtaaaagaaaggggattcagacattgaaaaaatttttcaaaacgattatcaaatgggcgcccgtcatctatccgattatcagaaaaatcataaaagaacggaaggcatctaagcggaaccgcatgtccgcatcccgaacagccggctgatccggctgtttttttacggtcttggcatcggattgccgcattgacttgaaatcctccccagtatagaatttacatacatttaccccttcctcattctttttgcccatttttcacatctgcatctgatctgataggaggtttttctcatgcttcatgggcggcttcgtgaacttctgcgcttgcttttagctgctgaaacaccggttacaagctcagtcatcgctgcaaatgtaaaggtaacgacgcggacggtccgcaatgacataaaggaactgcaaaccattgtagaaaaacacggcgcatccattcaatctgtcagagggagcggctataagctgctgatccggaatgagcagccgtttaaaaactggcttcaggacaatttccagcagaacagcaccgtaccgatttttcccgatgaacggatagattacctgatgaaaagaatgcttctggccgacggctacctcaagctggatgacttggcggaagaactgttcatcagtaaatccacacttcaatctgatttaaaagaagtcaaaaaacggctccgcccctatgacatcattttggaaacaaggccgaactacggctttaagctgcgcggcgaagagctccgcctccgttattgtatggcggaatacttagtggacgaccgcgagcccgagcctgatctcctgagtgaaaaggccggtattctgccgaaagacgacattcatgtgatccgcacagccattatgaagcaggttcgaaaccataagatcccgctttctttcttcggcctgaacaatctcatcatccatatcgccattgcctgcaaacgaatccggacagaaaactatgtatctctcattccggaagatcttcatgatattaagctcgaaacagaatatcagtcagcggaagccatcgtaaaagagcttgaatctgcgctttcggtcacctttcccgaacaggaaaccgcctatatcgccattcacctgctcgggacaaagcgcatgacccagtcacaaatggaaggaaaagagcttacaaggctgatagacggggaaaccagccgtttgacggaggccatgattgaagccattgagcgggagctgaagctcggaatcacggacgacaatgagctgaaagcgggtcttgcgctccatatcaagccggcgattaaccgaaaccggtacggaatgaacctgagaaacccgatgctctccgccataaaggagaattatccgctcgcatttgaagcgggagtgattgcgggaatcgtgatcaaggagcaaaccggcattgatattcatgaaaatgagatcgggtatttggcgcttcatttcggagccgctattgaaaggagaaagacggaacggccgcctaaacgctgtctgattgtctgtgcgtccggcgccggcagcgcgcagcttttaagagaaaagctccgttcccggttcgcaaaacgtcttgaaatcgtcggaacggctgattactgcagccttgaccagctttcctttgagtcgattgattttgtggtcagcacagtgccgatcaaaaaagacctgcccgttcccgtattgaaggttcatacgctgctgggcggcggggattttacaaaaatcgacgccatgctggaagaaaatcgggaacaattgaactttctgaaaccggagctggtatttttgcagcaggatctggagacgaaggaggacgtcatccgttttctcggacagcaggttgcagaagccggcctcgcttctgattctctgaccgattctatttttgaaagggaagcgatttctcctacgagtttcggcaatcttacggcgattccgcacccgctcgttccgcagacagacacgacgttttgggcggtatgcacgctgaagaagccgattgactgggcggataagcgtgtccaatttgtctgcctgctctgcgtcgagaaagaaagcaaagccgacctccagcatatgtacaaatggctcggcggcatgttggatgatccggccgcggtaagccgtctcttaaaatgcacaacctatcaggaggttttacgagtattcagagacaaacgatcagagaaagaccgggatacaccttttttccgttagcagcggaaaaagcctgagtagttatgaaagcgatttcataatatgatgttactaacatcgagacatacaaaatatcaaactttcaggaggtcttttacatgaatatattactcgtttgtgcagcagggatgtcaacaagcttactcgtcaccaagatggaaaaaagcgcgcaggaacaaggaaaagaatataaaatctgggcggtgtcaggcgattcagtcaaccagcatattgataaagcggacgtattgctgcttgggcctcaagtccgttatttgcttccgcagctgaaaaaattgggtgaatcaaaaggagtgccggttgaagtcatcaataccgtccattacggcacttgcaacggagcggaggttctgaaatcagcggaacagctcggaaacgcatcgtagaaaggggcgggccgtgtgaataaggtgaaccagtttttagaagagaaagtcatgcccattgccggaaaaattgcctcccagcggcatctgcaagcactgcgtgacggaatcatcctcaccatgccgcttatcatcatcggttcattttttctgatcatcggcaacctgccgattccgggatatgcggatttcatggcgaagacgttcggaagcgcctggtctcaaaaactgcaatatccggttgatgcgacctttgaaatcatgggccttgtcgccgctttcggaatcgcctaccgcctggctgaaaaatacggggtggacgcattatcggccggtgcgatatctttggcggcgtttctcttggcaacgccgtacaaagttccgtttctgccttccggcgcaaaagaggaaatcatggtgggcggcggcatcccgctgtctctcatgggaagcaaagggctgtttgtcgcgatgatcatcgccatgctgtcgacggaaatttaccgcctgatcatccagcggaatttcgtcttcaaaatgccggacggcgtgcctccggcggtcagcaaatcatttgtcgctttaattcccggctttgccgtcatctttctgatctggggtgcgcgtttaattgtcgaagcgacgccgtttgaaagccttcataacattgtaagcgttgtactggggacgccgctctcgattcttgggggaagtctcggcggaagcctggtagccgaagcggttcaaatgcttttgtgggcgtgcggattacatggggcgaacattgtcggcggcgtcatggcgccgatctggttcggagcgatggatgccaaccgtgttgcgtttcaggcaggcgatgcgctgccgaatattttcacccagcagttctttgaaatctggatcaacatcggcggaagcggcgcgacactggcgctcgtggtcaccatgtttctccgttcgcgaagcaagcagatgaagcagcttgggaaactcgccatcgggccggctgtctttaatattaatgagccgattattttcggaatgccgatcgtcatgaacccgatgcttctcattccgttcatcatcacaccgcttgtcacactggtctttacctatatcggcatgagcacaggcctcgtcgccaaacctgccggcattgccgtcccatggacgatgccgccgattttctccggctatcttgccacgggcggaaaaatatcaggggctgtcatgcaggcgattaatatcatcacagcctttatcgtgtactatccgttcttcagaatgtgggattcgcaaaagctgaaagaagaaaacgaacttgaacaatcgcaggcgccagccgtacagggagacgaaaaagccgtgctgtagagaaagggagtgaaacacatgaatgaaaaaatggaacagaccatttttcagatcatcctgcatggcggcaacggcagaagcgcatcaatggaagccattgccgccgcaaagcagggggacagagccatggccgaggaaaagcttcaggaagccgcaagggaactgaccgaagcccatcattaccagacagaattgatccaaaatgaagccggcggagaaaaaacagacatgacgcttttaatggtgcatgcgcaggatcatttaatgaatgccatgaccgtgaaagacttggccgctgagttagtcgagatttacgaaaaagtgagtctgcaagggggagcaaaaatatgacaaaaagaattaaaattgtaacgatcggcggaggttcaagctatacaccggagcttgtggaaggcatcattaagcgctatgaggaactgcctgtcagagaattatggctcgtcgacattcccgaaggcgagaaaaaactcaatatcgtcggcacgcttgcaaaacgcatggtcgaaaaagcgggtgttccgatagagattcacctgacgcttgaccggagagaagccttgaaggatgcggatttcgtaacgactcaattccgcgtcggtctccttgaggcccgcgccaaagacgaacggattccgttaaaatacggcgtaatcggccaggagacaaacggtccgggcggtttattcaaagggctgcgcaccatcccggttattctggaaatcgcgaaagacatcgaagagctttgtccgaatgcgtggcttgtgaatttcacaaaccctgccggcatggttaccgaggccttgctccgctactcgaatctcacaaaagtcgtcggcctctgcaatgtgccgatcggcattaaaatgggcgtcgcaaaagcattggatgtggatgtcagccggatcgaagtgcaatttgccggactgaatcacatggtcttcgggttagatgttttcttagacggcgtcagcgtgaaggatcaagtcatcgaagcgatgggagacccggaaaacgccatgacgatgaaaaacatttccggagcggaatgggagcctgaattcctgaaggcgctcgatctgattccttgcggctaccaccgctattatttcaaaacgaaagaaatgctcgagcatgaaatagaagcttcacagacggagggcacacgcgccgaggtcgtgcagaaggttgagaaagaactgttcgaactgtacaaagatccgaatctcgccatcaaaccgccgcagctggaaaaacggggcggagcgtactacagtgacgcggcctgcaacctgatcagctccatctataacgacaaacatgatatccagcccgtcaatacgataaacaacggcgcgatcgccagcattccgaatgactcagcggtcgaagtgaactgcgtcatgacgaaagacggtccgaaaccgatcgccgtcggtgatctgccggtgtctgtccgcggactcgtccagcaaatcaaatcatttgagcgcgtcgccgctgaagcagccgtcacgggagattatcaaacggcgcttcttgcgatgacgatcaaccctcttgtcccgtcagactccgtggcaaaggccattctggatgaaatgcttgaggcccacaaagaacatctgccccatttctttaagtcgattgaagcataagagcagtaaaaaaacccggattcgcttccgggttttttgcttattttgattcgcttagtgaggcgactttcgccgtccagccgaacacgtcggcttccgcgcctttttgaatgcctgtaatggtatcatacaatttcttcgagatctctccggtttcaccgctgccgatgacaagactttcatcattccagatcagttcgccgaccggagaaatgaccgccgccgtaccggttccgaatgtttcttccaatcggccgtcacgatgcgcctggatgatttcatcgatcgaaatcttccgctcagacacagtcagtccccaatgtttgagaagggtgatgacggaatttctcgtaatcccttcaagaatgcttccgttcagctccggcgtcacgatttcgccgctgattttgaagaagatgttcatgctgccgacttcttcgatgtatttcttctcaatgccgtcaagccataaaacctgggaaaatcccttctcttccgcaacctgctgcgctttcaggcttgatgcgtagttgccggcggttttcgcgtttccggtgccgcctttgacggcgcgcacgaattcgttttccacggcgatttttaccggtttaatgccttctttgtaataagagccgaccggggaaaggatgataaacagcttgtacgtatgggatgccgctacaccgaggaaaggctcggtcgcaataataaacggacggatataaagggaagtgccttccgctttcggaatccagtcttggtcgatggctacgagctgtttcaggccttcaagaacaagctcttcatcaatgagcgggatgcaaaggcggtcatttgactggttcaggcgctccatatttttctccggtctgaacagaagcacttcctgatccttcgttacatacgctttaagcccttcaaaaacggtttggccgtaatgataaaccatggccgcaggatccattgagatggactgataagggataattctcggatcataccatccttgatcggcgtcgtaatccataacaaacatatggtcggtgaaaattctgccgaacgcaaggttatgggggtccggtttcggttttttggctgaagtcaattcaacacgaatgtcttgtttcataatgttctgtctccctattggtgttattgtcaaacttatttgaaaataatttatattctattgtataccttcaacaaatattcgcaatagttttcctcaaatttgtgaaaaaatcaaatcacataaaaagcaggggagagaatgccccctgcgtgttcgtttttacatattctgtaatcatcgtgctcagtgaaccgtcaccttgccggttttgtaaaactgctccattgctttatcgacgtacacccagcccttccaggcgatatggatggtgtctttcataaagtacggatcatattcgtgcccggataagtcggcaacctgaaagcccttcgctttaatttgcttagtgacttttttgtagtaatcagtccggccttttttcgggaagccggtgtagtcataccattttccgttgaccggaataactacgaacatcggttcagcgccggcatctttcagaatgtccagcatatcctcaaagtcgtgatattcgactgatttggcgtacgttcttcctttgttgattcctttcactctctttactttcttcttaatctttttataagaagcgtcatcgatatagaaaggattggacttggagctccgttctcctaattgagcggcggctgtttttaactctgaccacgatttccctttcaggttttcagagatcgtccgttcagggcccttggtttctcccattgaataataaagatcttttttctcaagcagagaataataagctttggcagccggcatgaccgctttcactttccatgattgtccgttgaccattcccttgtataattcagaaaggacggcatcatgctgaacaactttaaaacggagcatgcgcttcatcatgttctttttgaccgcgggatcaatctggttattaaatgctaaatccaatgcctgaagtgatgaaaaattcggcgcaaagtgctgttcatcagaaccttttttgataaaccattgcggagaaacaatgaataccagctttttgcccttcagctgctgataatgcgccgcaaagttcacggcgtgtatcaaggattggtccccgccttttccgacaagataaggcgtaaagccttggttgttcacttggaaatagttggacgggtgaaactcatccagtcttgaaagctcggaagaaccgaaaatcggcatatacttcgagtcttcgaacattttgttttgcagatagaggccctggaacatattcggatttaaggccgctgccgactcttcgacacgtttttcaggaatgaagcgcgtaagccatgaagccggaactgcgatagctccgacaaacaggacaaacgctaaaataattggtccaaagaaacgctttttcatttacttcaactcagtcagtttgtttacaatgttgtttggcgtattccactcgtcacggtcaaattcagtgatcggcactgtaatgccgaagcggttttcgatggcgacaagcagttctacagttccgaaagaatcaagcagtccttcttcaaagatttcaatatcaggattttctttcacagcgtcctcctgacaaacttcagctaatacgtctaatacttcctgtttaaattccatgtgttttcaatctcctttagtgatgaaatggttttcctgagaaaatataaaatccgaaacatacgaaatggaatgtgatgacgatggctaaaaaggccgtaaaacgattggcgggcagccacttgtatttcttattccatttctcaaaaaagttatacccggtcattaatacggcgtggtaaaggccgtatataatatattgcagggcgagtccgtgccagacgcccatcagcatgaacagcaggaaatacccgatgttcgagacggccatccggttctttatccattttttctttgtcatccagaatacaaagcgcataaatacgtagtctctgaaccagaaggataaggacatgtgccagcggttccagaagtctttaatgtttttgctgataaacggcttattaaagttttccggagatttgatacccatgatatagcttacaccgacggcaaacatcgtgtaacccgcaaaatcaaaaaacaggtacaagctgtatccgtacatgtacagcacattaccccacagtttactgtgggtgatatgaggcagattcataatgaaatacgtgttaatcgcatatccgataatgaatttgtacaagaaaccgataaaaattttatgaatgccggtatacagtaaatcagcgtattctccctttgtccatactttctgttcgtccttggcaaatctgcggtatctgtcgatcggaccggaagaaatggtcgggaaaaacataataaagtacaaaaggcggtgaagcggcattttttctttaatcagtccgtctctcgtttccatgatcagctggacgcctttaaatgtcaaataagaaattcctaagaaactgatcaggttatgaaccggatgatgaggcgccggcgggaagaaaaacggccataatttagataaaaacaggggtaaaatggacgcgatcacggccatactgaagacaaagccgctgttggctttcagtctgtaagcgagataacccctgattaaaagcacctgccacagcgtaaagatacatagtgcgatcacgccgtgcagatcatgcgcgaaaatcaaagccaatacgatgatggatataaacatgttgtatccttggaatctcttgccgttcagccctaaaataatcgtcggcaaaagaaggattccaagtaagataaagaagaaaaacgagctgtaaggcgtcatacaagaacctcttcgccaatgcgtttacggtcgatttttccgttcgcagtcatttgaatgtgatcctgataaatgaattttctcggaatcatgtaggccggaagcgaagcggccagttcttttttaatggcgcttgtcagctggaattctttttcaaaatcatgtttttcaggcacgatggcggcaattaaatattcgactggtccgttaggctgatacgggatgacaaccgccgtctgcacatattgagactgccttacatgtacttcgatttcctccagctccatgcggtagccgtgaagcttaatctggaaatcaaggcgtccttggcagaaaatctgaccatcctgaacataaccggcatcacccgtgtgatatgcccactggccgtcaattgagaaaaacgctttttccgtcagagacggttcaccgagatagcctttgctcacgctcggcccggcgatgatgatttcccctttttctccgtccggaagcttattcccgttttcatccatgatgaagatattcatatcgggttttgcaaaaccgacgggcagagattcattttcatcgataatctgctgcgtaatttcaacggaggtgacggcaaccgttgtttcagtcgggccgtatgtattgaatacgcgggccttcggaaaacggtttaacagttcctgtgccacggcagccggaagcgcttctccgcaaaacataaatacttctgcctcaggcaggagctcctgcgtaaagccggggtccatcagacacatttggacgaaagacggcgtcgatgtccagacgttcagtttggatttctccagctcttcaaatagtactttcggtttattgattttgtctttcgttacgcagtgcagcgtacctcccgtttgaagcgacgggaaaatgtccatgacagataaatcaaaagaaaacggagcttggtttaagaatgtcttacccccgcccacaggaaaatccctgcagatccagtcagtgaagctttgcaggttatcagccgatatctgcacgcccttcggatttcccgtgctgccggacgtgtaaataatgtaaaacgtatccagctcttttacccagttctcacggctgaggtctgcatctccgtcagctgcaagctcttcgggcgtaacggttttaatcagattgcttcccgtatcgactgcatcgcccgatacgctgataagcagctctgcgcctgagctttcaatgattttgacgatccgctccgccggaatggaaacatcgacagggatgtaagggcggcccgctttgacgcttcccaagaaagaaacaatcatattcggctccatatgtccgtaaaccaggacaggcgctttcgaaccgtcagctgtatgtttttgaatgccggacgcaacccgctccgacaaatcccataattccccgtaagtgagggaatgatctaaggaacgaaacgcttcggcctgcggcttggcgtctgcgtatgtttttatagcatcaagtagtttcatagttatcctccccgattagaaatcgttgtaaatataagtgccggtattcgctgtatgaaatccatacatccaaaagagcaatactaatatcagaaaataaaagcccgtatgaaacgtccatttgatcaatgtattttcataagcacgttttaatttttgcatcatattcaaaattccttccccgcgtattcaataattacaccagtatatgacgattagattaacaaaaagtttcaaaatatgtctaatatcctaagcttaaaatttccttaaaaatgaatgagaaacaaaaggatggaaaacacgcatgtataaattggcaaatgatcatactaaaaaggcgctgttcaggcgggatttttaacttatcgtaaatataaacgaggtaaaaaaattttggcggctttttcttaagcaggcttgtgccgaaccccaagggagaagggcgaaaagccgtttccggcaggatagctgataaagcgccgcatcttgtgaaatgaggaagaaattattatgatagataaggtagcagaaaacgtgaaaaccccaattcaacactactgttatcggctgactgtgaaagccttttaatagaaaggaagaggaaaatgaatcaaaacaatatggggggcagccaaaagacgcccgagaaagaaagcatgggccgcattttgtggcagctaacccgccctcatacattgacggcatcgtttgtgcccgtacttctcggcaccgtattggcgatgttttacgtaaaggttgatttcctgctgtttttggccatgctgttttcctgcctttggatccagatcgccacgaacttattcaatgaatattacgattttaaacgcggtttagatacggaggattccgtcggtatcggcggagcgatcgtccgccacggcatgaagccgaaaacaattctgcagctggcgctcggctcttatgcgattgctctcgtgctcggtgtttatatctgcatgagcagcagctggtggcttgcggctatcggccttgccggcatgctgatcggctatctgtatacgggcggcccgctgccgattgcgtatacaccgttcggggaactgttctccggcatttgcatgggctctgtatttgtccttatttcttttttcattcagacaggcagaattaatgaacagagcattttgatttccatcccgatcgccatcctggtcggagcgattaacctgtccaacaatattcgtgatattgaggaagataaaaaaggcggacgtaaaacgctggccattttgatggggcatagaggggccgttatgatactggcggcatcttttgccatcgcttacatctggatcgtcggtcttgtcatcatgggttacacaagcccgtggctgttcctggtctttttgagcgtgccgaaacccgttcaggccgtgaaaggctttgtgaaaaacgaaatgccgatgaacatgattattgcgatgaaatcaacggcgcaaaccaatacattcttcggattcctgctttcaatcggactcctgatcagttatttccgctgatcaaatgaaagggcaaatgctataaccggcatttgcttttttttatgacataatcttcacgatattgtaaagaacctgaccgcggactgacccgtctcatatatggacagcaaagcaaggagatgaaaaaaatggacttgtcaacagcccatatggatgatttaaaaacggtcatggaagattggaaaaatgaattattagtttataaattcgctttagatgagctggatacgaagttttctatcatcagccaggaatataatctgattcacgggcataacccgatcgagcatacaaaatcacgcgtgaaaagttttgaaagcatcgtcaataaactgatgcgcaaaggctgcgatgtgacgacgcaggaaatgaaagagcatattcatgatatcgcgggtgtcaggattatctgttcctttatttccgatatttataatgtcgctgaggttctgaagcagcataaggacctgaagatcgtaaaggtgaaggattatatcaaacatccgaagccgaacggctaccgcagcctgcatttgattattgaaattcccgtttatttgacgaatcgtgtggaatatgtgaaggcggaaattcaaatccgcaccatcgccatggatttttgggcgagccttgaacacaaaatttattacaaattaaataacgaagtcccaaagcatctgaccgacgagctgaaggaagcggcggacatcgcccattatttagacgaaaagatgcttgggattaagaaagaagtcgattaaacgattgacccgtcacaaccagccggaccgctattatacgcagtccggctggttgtttatccgtttatgcgcagctgtacaaattttcgcctgcccacctgaatcgtcatgccgtcttctgcggtaatgacggtatgaagggcatccgttttctccccgttcactttgattccgccgttttgaatcatacggcgtgcttcgctttttgaagaaaagagtccaagcgtgacaagcagctcaataaggggcacggtcttttctccgtcccatatgacggttttcatatcttcaggcaggctgttttgctggaagacacgtttgaaatgccgctctgccgcatccgccgctttcgtgccgtggtacattctgacgattgtacccgctaagatcattttggcatctctcggatgaagctttcctgattccaaatccttctccatctgttttttctccgcaggctctaagtctgtcgctaaatggatatatgttttcatcaggctgtccggcaatgacatcgttttgccgtacatgtcgttcggatgctcgtcaatgccgatatagttgttttttgatttagacattttttcaacgccgtcaagaccttccaaaagcggcatgaggatgacgacctgcttttcttttttgtagcgttcttggaaatggcggcccatcagcacgttaaaatgctggtccgtaccgccgagttcgatatcgctttcgagaacgacagaatcgtaaccctgcatcagcgggtaaaagaattcgtgaagtgagatcggtttttgcatggcgatgcgctcctcaaagtcgtcgcgctccatcaggcgggcgacagtaattttccccgctaattcaatcacatcttccagattcaatgtcttcagccattttgagttgcagtgaagttcaactttgtcttgatccagcaccttgccaaactgttcaaaataggttttggcattgtgttggacttcttcatcagtcagctgttttctggcttgcgacttccccgtcggatcaccgatttttccggtaaagtccccgataacaagctgtatgatatggccgttttcttgaaattggcgcagtttgtttaacacgacggtatggcccaagtggacgtcgggtgcggacggatcaaggccgagtttaatgttcagcggcttgccggatgccactgatttggcgattttatttctcaattcttcaggcggtatgacgtccgcggcgccggtcatgtacaaatccagctgcctttgcacttctttttcctgatcattcgttaaagtgattgattccatcttttacatcctcctttttttagccaaacaaaaaagccgcatcccaaaaagggacgtggctgtatgcacgcggtaccaccctgattgaagacgaaacgacgtcttccgctcattcgaataacggtttcccgttctttgctactgaagttcacaaagaaagctcagggaggtaattcacgtttgtctttgtgccggcttgcaccatccgccggctctctgaaacagggagacaatccgttactgattcccgtcatagctgctatgttatgaaattgtcagcgattttttgcagcagggcggacagcgttttttgttcctgtttatccagacaggccgtcagttcaatttccccctgatgaaagtcggggtacagatcttcaataacctttctgccctcatcggtaatactgacgaatacaagcctgcggtctcttttgttcgtttgtctgctgcataagcccttcttttccaaagtgttcaggacattgctcgccgtcgccgaggtaattccggatagagcggctatccttcttgtatcaagcgtttcccattcacaaaggtcatacaggatggaaaacgccgtccatgataatttgtgtgccgacagcacctctttctccatttttacacggagctgctgggcggaccgatagagtgcagctgcaatataggccgcctctttgtttcggccggatagatcggaaaaaggcctgttcggcttcttattgtctgatccggcatcgttgcgaatcgtcaatggcgtcatgctccttattattgtcagaatcattagctatgaaatgaattttaacagagaatgcgaaagatatcaaatcgcaaacagcacattcccgcagaaaaaatgtgtaagattgaggtttactttttaaaaaaagggaaagacatttgtacaacaaaaagggagatgaatatcagtgggaaagaatgaaacaatgcatatcgtatcatgtgccgatgataattatgctcgtcatttgggtgggatgttcgcttctttattgatgaatatggataaaacaaggaatgccaaattatatgtgatcgacggcggaattactgccgaaaacaaggacaagcttgaacagactgcgatgtcattcgggacgccgcttgaatttttagaagtagacgctgatcaatacaagcatgcagtcgaaagcagccatattacaaaagcggcttattaccgcatttctatccctgatttaattaaggatgagtccgtaaagcggatgatttacatcgattgcgatgcaattgtgatggaagatatttcggttttatgggacttggatatttccccggcaatagttgcggcggtagaagatgccggacagcatgaaagactgaaaaaaatgaatatcagcgacactgccaagtattttaattccggtattatgattatagatttcgaaccttggagaaaacagaatatttccaaaaaagtgattgattttatcaatgataacagctcggaggattttctcgtgtttcatgatcaggacgcgcttaacgcgatcttatatgatcaatggcatgaactgcatccgcgctggaacgcgcagacgcatattatcatgaatgagaaaacgcctcctgaactgatcgaccgtatacgttacagagaaacacgtgccgaaccggccatcgtccatttctgcggcggggacaagccttggaatacaggcacctcgcacccgtatcgtgatcattatttccgatatatgtcctttacgaaatggaacacgattgaccgcccggccatgaaccaataggcaggtgtgatgaaaacgcttgtgaagccgttgaccggctcacaagcgttttttttattatttcacccgaatcgcacgcacgcgtttttgcaggctggtcttttcggcagacggcttcaatcggctgactgccgtttgcgccgctgattttgcttttttcgtcttggttttttccgccgtttttactttgtcccttgcctgctgccggttgagtttatcttttatccagccaagccgtttttccagaacggttttttcttttcccggctggatttcgctgactgctttttgggcttttgcggtgttggcctcagaagtctttttttccgcctgcttgacgctggcctcagcagttctcaaaaggcttgagttgacagcgttcagccgcttttgcagcccttttttctctgaaccggccggtaatttgcggatggcgctttgtgcggcattgacggcggtttttttcttttgtttttcggcagtccggactttgtctcttgcgtccgtcacatttcttgccgtctgaactttattgatccgcgcctcgagagcggtttttccttttgacttggacagtttgctgactgccgtttttgcttcatcgatatctgcctgctttttcgtcttttccgcttttattacggcccgttcggcaaagctcttttgttttgtgtgatattgcgccagtccgtagccgaatcggctgtcacgtccgggagcgcccagatctttgacgttctgctgcatctgctgccggagctgtgtatttgtttcctccggatatttctgcctgagcagcgcgaacatgccggtgacgtgcggcgcggcttgagatgtgccgtcagctgtggcgtacatttgattcagatacgtgctcgtaatattagtgccgggtgcggcaaactcaatttgttttccggtcgtggaaaaagctgcgagcccgtttttttcagttgacgctgagactgccgttacgctgctgtaggcgcccggataattgacgggttttttattgccgtcgtttcctgcggcggcaacgatcacgattccttttttgtaagctttgtcaacggcgtcgtgaagacttttgctgtctgcgtttgtcccgaggctcatattgatgatgtccattttattggcgatcgaccagtcgatcgctttaagaaggcttttgagatctcccgctccttttctgtctaatgctttaaccgcatataaccggacatccggcgcgatgccgtcgatgccgtatccgtcatgtttggccgcaatgattccggcgacatgcgtcccgtgtccgttgtcatctttgtatgagggagtatagctgactgcggaatagcctccggcaatggagagatcatcatgagggtaaatgccgctgtcaatgacagccactttcaccttttttcccgtcaagccttctttccacgcctgcttaacctgagtcggttcgatatcccattgcggcagcacgtaactgctgctttgggcagctgataacgggcggatatcagaaccgcctgctgcctgaaaggatacattctcttctacatataagatgtcagggtcctgtttcaggtctttcactgtttgcgaatcggctgacacggcgactgccgggagatgctgataggtctgttccacatccgctccgctgtctatggcggattccttgccgttttgatttttgtacaccacgataacgtcccggtcatgcgtctcggcgtgcgcgggcgccgcggcggagaacaggctgatgcacaaggccgcggccattatcggtttcagggtgtgatacattgcgattccccctttttctttatatatcggcagtgcggaattctttttttcctgaggggtaaggaaaatttctgtatgcaaatgtaagcgtttccaaaatatgatggagaaaatgctttaagacatctgcgcaatgaactcaaaaagggggtttttgataaatgagtacgttcaatcgggtcatggaagaaaaaatcatgcctgtcgccggaaaagtcgccggccaaaggcacttaagagctttgcgggacggcattattttgactatgccgcttatcatcatcggatcggtttttctgattctgacgagtcttccgattcccggttatgccgattttatggctggtcttttcggtgaaaattgggttgaaaagctcgggtatcccgtgaatgcgtcctttgacattatggcgcttgtcgccgcctttgggattgcttaccggcttgcggaaagctatgaggtggatgccctgtcgtcgggagccattgcccttgccgcctttttattggcgacgccgtatcagattccgtttatccctgacggctcgtcaacagagattatggtgggaggcggcataccgatttcgctgctcggaagcaaaggtctgtttgtcgcgatgatcattgcaatgctgtctacggaagtgtaccggtttattatacaaagaaatatcgtcattaagatgcctgacggagtgccgcctgcggtcagcaaatcgttcgttgcgctcatccccggtttcattattattacgcttgtatggctggcccgtctgtttattgaaataactccttttaaaagtctccacaatgtcgtaggcgatctgctgggcaccccgctgtctattttgggcgggagtctcggcggaagtcttatcgccgaattcgtgcaaatgctgctttggtcgtgcggcatacacggcgcgtccataatcggcggcgtcatgtcgccgatctggtacggggcgatggacgccaaccgtttggcttttcaggcgggagaagcgctgccgagcatttttacgacacagttctttcaaatatggattaatgtcggcggaagcggagcgacgcttgcccttgtgctgaccatgcttgtgcgctccagaagcaaacagatgaaacagctcggccgtctcggcatcgggcccgcgatttttaacattaacgaaccgattattttcgggatgccgctcgtcatgaatccgctgttaatcgtgccttttattgttgcgccgctcttgaccattacggcgacgtacatcgggatgagcacggggatggtggcaaaaccggcgggaatcgccgtgccgtggacgatgccgccgctgatttccggttatttggcgacgggcggaaaaatctccggttcggtcatgcagctgatcaatctcctgattacatttatcatttattatccgtttttccgaatttgggatcttcaaaaatggagagaggaacgggcggcggaacaaaacgtcacagaagaaacataaaaaaaaacgggcgctttcgcccgtttttttaacgctggaaaaattcgatccattcgccgtcaggtccttcaatgtaaaagtagcggtacccgttcggaagtgtcgtgatttcttcatcaatgaatacggcgccctgacgcttcgcatgcgtgaactccgctgcgatatcttcagtcaataaagcgacatggtgcacttttccttctgcgggaagctcgctgctgtagccctggatcagctcaatttctgtctccggcccttcttgaaagccgagaaaggcaagttcaataatgccgttcgtatgagtgatacgatcctttaactgcataccgagaacgtcttggtaaaaggcgatggatgtttcaatatctttgaccataatgcctgtatggtcgattcttttggctgtcatggttttccccctgttttgaatttttcgggacaatgcggtgttgatcatgttttatggtacgataagagaaagcaaaacgaaagaggaatgcacaatgaagctacttacagtgaaagatacatttgccggaaagctgaaaaaaggattccccctgattgaaaaagacgctctgtccggaagctcggctcatttaacagagggcgatctttttgatgtgacatccgagaagggtgagtttatcggaaaaggctattacggtttgcagaataaaggagtcggctgggtgctgtcccgcgcgagagatgaacggatcgacggacgtttctttctggacaagctgaaaaaagcggctgaagcaagagcccatctgtttaacgcgcccgatacgacggcgttccggcttttcaacggtgagggcgacggcatcggcggcgtcacgattgacttttatgacggttatctgctgattcaatggtacagtaaaggcatttacgcttataaggacagcatgattgaggcgattgacggactggagctttcttataaagcgatctatgaaaagaaacgattcgatactgccgggcaatacgtggaagacgacgattttgtcaaaggcgaaagaggagattttccggtcattgttcaagaaaacggcatacggtacgcggcggatttaaacgatggggcgatgacgggcattttcttagaccagcgtcatgtacgcaaagcgattcgggacaagtatgcaaacggcagacgggtgctgaatacgttctcttatacgggggcattttccgttgcggcggcgcttggcggagctgagaaaacgacaagcgtcgatgtcgccaaccgcagtctcgcaaaaacgattgaacagttcagcgccaacggaattgattatgaggcgcatgacattaaggtcatggatgttttcaaatacttcggctatgcggagaaaaaagggctggcgtttgacctcatcatccttgatccgccttctttcgcccgcacaaaaaaacggacgttcagcgcggcgaaagattataaaaacctgctgaaggaaacgatcgccatcaccgcaaaaaacggcatcatcgtcgcttcgacaaacagcagcgccttcaatatgaagaaatttaaaggttttatagagaccgcctttaaagaaacaaatgagcgttacgacattttggaagaatacacgcttccggaagatttcaaaacgattccggcgtttaaagaagggaactatttgaaggttgttttcttgcggaaaaaataggatgatcatttatagcgtggaaagagggggaaaagaaaaccctcttccatcgctttaatacgggataaataatcttcatatcttactgtttaaagaaaaaacccgctattatttagtatctcatctgtgccaagtaaagtggcctcactaatccctccgcccaattgtatcctcgataatgattttaatgggcaccaccctttttttgagtatctatataaattgtaatggcatcactcatgagcttcgccaacccttcaccataccggtcgatgttcttagtgaagcgttcatcttcaatatagagttgacctaatccgtaaaaggcatcaaaagaatattcaccaaaattttcattgagaaaatcaaaccactctttgatagctgtttgtacgtctggggactcgggagattggttaataaggagtgcaaatttattgaacattgcagtccacttatcagataaatctttttgctcaccatcagtcatgtttttcaatctaatatttaccttatcgacaggttgatcaccccaccgtttgcgggcttcttgctcataaagattatcattaaagttaattccctcaaaccgctctttgttcgtcatgcaaatctctcccatcatatgtttgattgatttatcgatggtttcaatcatcttattgactctattccgtttctcaatcaacattttcttttgtaaaatgaatgcttcccttcggttaaatgaaggattagtaatgatttctttaatctcttttaaggagaaatcgagctccttgaaaaatagtatctgctgcagctgttcaagattctcttcagaataaagccgataaccggaatcggtcgtttcctgaggagtcaataatccaatttgatcgtaatgatggagagtgcgtatgcttactccaatcaggtcagctacttcttttactttcatacccattacgtttgccgcctccttaatggctactctaaagtattacgcaacgtaagagtcaatagttggttaaaaattttttgtatataaagggagaacatatgaggatttcattgctgaaattaaagaaaaaaaagccgggcgtgaagctccggcttttttctattcaataatgtgctgcacccggccgattcgcccgtcttcaaggcggaccttaatgccgcgcgggtggaagcttgagttcgtcaaaatatccttcacgattcctcttgtcagctttcctgaacgctgatcggctttcaggacgatatcgacttcaagtccttttctgatgctgcttcgctgctggccgttcatatgacacatccgttcttcagtcttttcacttcatgtcttatcatatcgtgttttcgtctttttatgaaggacagacaaatcaattcttcatggcaactaaaaaaagaccgctctgtaaggagcagtcttttatgacataaacgaaagcaaaatcggggccgcgcacagtgtcataatcgcggcgagaatcatggacacgcttgagatcgttcctgatacggagctgagctcaaatgctttagatgttcccgctccgtgcgcgctagttccgagcagcacgccccgggcaatttcgttatcaatgcggaaatagcggatgaccatcggcccgatgatcgttcccaataaagccgttaaaatgacgaaaaccgctgtaacggccggcatcccgccgatcatttctgaaacgttcatggcaatcggcgtcgtcacggatcgcggcacgagactgtcgactaagctgctgccgagattgaaccattttgcgataaaggctgttgacagaatggcgatacatgaaccgaccgctacgttcaaaataatttccacggcgtatttctttaaaatcgggaaatatttataaagcgggatggcgaacgccactgttgccggctgaagcatatcggtcagcagtccgccgccgagattgtatgtctgatacgggacattgacaagaagcagcagtacgaccaaaacagcgggcgtaatcagaagcggcgacgtatacacccgcggaaaacgaatgtagagttttttcgcgcccaaatatactaagacagttaagaataaacttatgattccgatgaacacgtttgttttttctcctttctttttgctatcagctgtgtaagcgtacctgttgaaaccatcacgacaaatgtgctgatgacgacgacaagtaaaatgcttacgccgaatttagacataatatctccgtattcaatcactccgacggcagacgggatgaaaaacagcagcagctcaccgaggagccatgctgcgccaagctcaatccattcaagtttgataatcttgaaatgcaataatgtgaaaagaatcacaatcccgattatactgccgggaatatttatatgaagagccgccgtgatccaattgatcagacgcgcaaatataaacagcagagcgatttgaataacggtaagcagcaattttttcataatgatgcctcccttatatttatattgtacagaaggttttgctataggtaaaatacatataaagaataatgtgtattccttttgtctatagaaaggatgaaatgtaatggatatccggcacttaacgtatttcttggaagtggcccgtttgaaaagctttacgaaggcttcacagtctctgtatgtttcacagccgacaatctcaaaaatgattaaaaacctggagacggagctcggcattaaactgttttaccgcaatggccggcaagttgaactgactgacgccggacagagcatgtatgtgcaggcgcaggaaatcacaaagtcattccaaaacctgacgtcagagctgaacgatattatggaagtgaagaaagggcacgtccgcatcggtcttccgccgatgatcgggtccggctttttcccgagagtgctcggtgacttccgcgtcacataccccgatgtgacgtttcagcttgttgaggacggctctattaaagtgcagcaaggggtggaggacggctcgcttgatatcggggtcgtcgtgcttcccgcgaatgaagagatttttcataccttcacaatcgtcaaggaaacccttatgcttgtcgtccatccgtcacatcggctcgctgacgagaaagaatgcagtcttcatgaattgaaagaagagccgttcatatttttcagggaggattttgtccttcataatcgaattatgacggaatgcgtgaaagccggattcaggccgcatgtcatttatgaaacatcacagtgggactttatcagcgaaatggtatccgccaatctcggtatcggcctgctgccggaaagaatctgtcgcggtcttgatcctgacaaagtcagaaccattccgctcgttcatccggtcattccgtggcatttagccatcatttggcggaaggaccgctatatgtcctttgccgccagagcctggctggagcatacgaaatcgtatttatggaatccgaaaaagagaaaaaaggatgattaagcatggacgcacaaaccgcagctcaacacttgagtaaagtgcgggatcaaaacccgctcgttcacagtatcaccaataatgtcgtcacgaacttcaccgctaacggactgctcgcgctcggcgcatcgcccgttatggcttatgcaattgaggaggccgccgacatggcgaaaatcgccggagcgctcgtcctgaacataggcaccctcagctcggcatcggttgaagctatgatcgcagccggaaaatcggccaatgaaaacggtgttccggtcatttttgatccggtaggcgccggcgccacgccgtttcggacggcatcagcccgcaagatcatacaggaggtccgcttgtccgttattcgcggaaatgccgcggaaattgccaatattgccggcgcccctgattggaagataaaaggcgtggatgcgggggaagccggaggagatgtggttcagctcgctaagacggctgcaagcgggctgaagacggtcattgcgattaccggaaaaaccgacgtcatctccgacggcaccgacacatacgccgtacaaaacggtgataaactgctgacgaaggtgacgggggcgggatgcctgctgacgtctgtaatcggagccttctgcgcagcggggcaggacgttctgcaagcggccgtttcagccgtttctgtatacggaagcgccgctcagcttgccgctttggacacctcccataaggggccgggcagcttccagattgagcttttaaacaagctggcaagcatctcagaacaagaagcggctgagcttgccgcaattgaaagggtgatagaaaaatgacgcgtatttctcgggaaatgatgaagaatatgttatcggtttattttattatgggatcaaacaatacaagcgcagacccggtttccgtggtgaaaaaagcaattgagggcggcgctacgctttttcaatttcgggaaaaggggagcggttctttaacaggggatgaacgtgtcctgttcgcgaagcgggtgcaggatgtctgcaggcaggccgggattcctttcatcattaatgatgatgccgaattggccttgcgccttgaggcggacggagtgcatatcggacaggatgacgcagacgccgaagaaacgagagcggcaatcggcgatatgattctcggtgtgtcagcacataacgtctccgaggtgaagcgggcggaagaagccggagccgattacgtcggaatgggcccggtctatccgaccgaaacaaaaaaagatgctgaagccgtgcagggagttacattgattgaagaggtacggcgtcagggcatcaccattccgattgtaggaatcggcggcattacggctgacaacgcggcgcccgtcattgaagcgggtgcagacggcgtcagcatgatcagtgccatcagccaagccgaagatccaaaagcggcggcgcggaagttttcagaggaaattcggcgctccaaagcagggctgtcccgatagggcggccctttttctgtgtgcgcaaaaaggcgtgacggactgggagaatagaagccgtatgtcaagaacagagcaatcaagcttgcaatatcgaccgaagcgtttgacggctctatcgcttctctcaaagtgacgcctgaaccaatcagcgcaggctcaaaagccctctataaaacagtgaatagcgcgaagtgagagaccatttcgaggtcacggaaaaacttaatgcggaattcagcgaatttgaagttttgatgtcgaaatacaaaacgtgcgatcaatgtatacgtcttgtgatacattaagtacagatcaaatcagagagataagcacgaagctgacggccctttctgaaaccatgtcgaagattgccgatgtgctttaaaaggagttaagacacagcatgagcgatgaacataacaaggaaaaacagatccacagacgggatgtcctgaagtggggcgccgtcgcgggcgcagccgtcgctgtcggagcgagcggcctcggaggactcgcgccgctcttcaaaccggcggccaccgcttcaaagaagaatgatgaaaaacgtgatcgtgatcaaatcgttcctttttacggaaagcaccaagcaggaatcacaacggcgcatcagacgtatgtgtattttgcggcgcttgatgtcatgtcaagcgacaaagccgatgtcatctcccttttcaaacaatggacaagcttgacgcagctgctgacttcaggcgccgtcccgtcaggcgaacagaaaaataaatatatgcctccgcaggataccggggagtcgcaggatctggcaccggcgaatttgaccgttaccttcggcttcggccccgggtttttcgagaaagacgggaaggaccgcttcggactgaaagataaaaaaccgaagcacctcgccgatattccgccgatgcctaacgacaagctcgataagaaacaaggcggcggtgatatcgtcatacaggtctgcgcggataatgaacaaacggcgtttcacgcggtgcgcaacctgatgaaacaggcatcgggtgtgtgtgaagtccgctttctcaataaaggtttcttaagcggcggaaaaaacggagaaacaccgcgcaacctcttcggattcaaagacggcaccggcaaccaaagcacgaaggatgaaaacctgatgaattcgatcgtttgggttcaatcaggagagccggactggatgacgggcggcacgtacatggcgtttaggaaaattaagatgtttttagatatatgggaccgttcatccttgaaggaacaagaggacacgttcgggcgggtgaaaagctcgggcgcgcctttcggacaaaaaaaggaaaccgatcccgtgaagctgaatcaaattcccgccgactcgcatgtcagcgtggcaaaatcaaccggcagacagattctgcgccgggcattttcctatacggacggaattgatccgaagacgggctatgttgacgcaggcctgttgtttatctgctttcaaaaagacccggaccgccaatttgtcccgatgctgaaggctttggcggcaaaggatgcgctgaatgaatacacacaaacgatcggctcttccttattcgcctgtcccggcggctgtaaaaaaggagaatatatcgcccaaaggctgctggaatcgtgacaccttccatatggagggtgttttttttaaaaaaaacacttgtaactataaaagttacaacttaaaatgataaggaaaggagacttacaatgacactgcagattaaagtatattctgattatgtatgtccgttttgctatgtcggcaaagcggcgtttgaagaagcaatcaaggacaaggacgtacaggtggaatggatgccgtttgaattgcgtccgagcccctcgccgaaacttgatccggtgaatgatcccgccaagcggcagatgtggaaaaactccattgagccgatggcgcagtcgttaggcgttgaaatcacgttcccccgcgtgtcaccgcatccatacacggatttggcatttgaaggctttcatttcgcaaaggaacacgggaaaggaagcgaataccatacacgcgtttttcaggcgttctttcaggaagaacaaaatatcggtgacgttggcgtgctgacaaagcttgcggaagaagccggacttgacggcgctgccttcaaagaggcgcttgagacaagagcgtacaaggacgtacagcgggaagcgctccgccatgcttatgaggaagccggcattacggcagtgccgacgtttatcatcggcgatgagagaatccctggcgcggcgggaaaggaaacctttgaacaaatcattgagcgggaactgaataaacgttaacccgaaaaaagccctctcgatcagcgagagggctttgccatatagtgtttgacaaatgtttgtctgtccgcttcatatgccgcggcgtcaaaggagtcgccgcaaaaatgaaggcaccaagggtctttctggcaggcgacgccgacttgatagccgtgtttttgaaattcgagcgactgtgatgtgtcgtaaaaatgaaagccgcgaaacaaatcctcccgccactccacgtcatattgagccgccattaacaagccgtcaatggcgtcagcgggcgtaaacaggccgtcttcatcaccgtgctcaaaatccagcgggtgataagcattcccccggtattcaatcacttttcccatccgctgtccgctttcccaccaaatgccgttcggcggcagggttttgcagccggcgacaccgagaaggccgagctcctgatgagattgaaagatatgaagcatgtcatgaaggaaatgctgatgaatgataaaagtatcctgatgcagataaattttatatttggaggggtgtttcagcgctttgttgtaggacgaggccatgcttgctgaatcgtatatcggcatgatatcaacggagtatgaagggggacggtaagctgcatgatatggctcttgcaccgggagtacagcgactcatcattcacacagacgacaaacagaaatgaatgtgaatccattacatgctcctctcggcctcaatcacatattgataggccgatgcttctgtcataaagtcatgccttatgccaagctgtacgcatacttcgtgcaatgatgcgatggctttgtggtaagaagggtgatcaacgcggatcgcctcaatgcgtttgacctcatagctggcggctttaaataatgaaagagtctcttcccgggtaaaaaaacgcaggtgggtctgatccattaatccggcgtcactgtaagtccatttgccggctaaaagctccaacacgactgagatgtggccgacattcggtatgcatgcaagcacagtgccgtctttttttacataaggacgaagctttttcagcactgtccacgggtcgacaagatgctcaagaacgtctccgaacagcatgcagtcgaattgctctgattcgtacggaagaatggcggattcaatgtcgccgcaaagcacgtggctcaatttgctttccgccttttttgcggcttcgggatacgcttcaatgccgtaaaccgttattccgcggtcttcgatcgccgctcctaaattgcccgtgccgcagccgacatcaagcactgtccgccagttttcgtctattttgttcaataaataaggattcaggccttcgtagtagttctgttgtttttcatcataatagggattcgtatccatctgtgtatcacctcataaatgggcataatacacaagatatgcagcggggggatctcatatcaccatgtttggctgttcaattgcggaatgcggacgggaatggttgtccggtatacggtttgttctctgattcccctcttattgcgggtgttcctttgaaaactcgggtgcgggcggactgtggcaggtcatatagtaaaaggatccgcctgtaatcttaccgctggcggatggtgtttttcattggtgtttttttcttcaccgctttttcagtatttaagaagcgcctcacatcgtcaatgtgcaaacccatgattctagcctcttgaattaacaattgccaatcttgatctatatctttcattacatgagttttcataagaacctccaattgaaaaattgatttgcccagctacagcagccaatgtataacaaatatcacacatagttggccggtaatcccaaattgaagatgaattcacctacctattccctaagaaaatgactgaaataaccaaaatccttcaagaattcttacatataataataaacaaataaatactgactggatagtatgcaaataaaaataaaccatatgacctattaacatttaccctcaaaacgtcgattagcatattctttttgcataaaaaataccgcaaaagaatgattcggtgtaagataaagtgaatgatcaaacagctggggtaaaaaatgaaaaaaaacaaatttcaaattaagagagaagaaacatttgaaagttttattgacgcaggccttcatctcctgattgaaagagcttacgattcagtctcaatcgatgacatcagtaaagcggcgggtttcagcaaaggggcgttttacgttcattttgaaagcaaggaagattttctgaagcatttgttagagaggcgtcagattaaaaaaaggatcatcactggctatctcgacgaattagaaaagcaaacagagcggccgttgacgctttgtgaagccgcggccagcgcggccagcctgttgatgcggtttgtaaacagcaagcctgcctggaatgttgtgtcttttgccgttcatatgcctacttacaaagtcgtcagtgaatatgaagcttatatccgcctgtataagttatggatagaagaaagcaccatgtacataaattggctcaaatcgagaaatttaatagaagaccatatagataccgagcataccgctaacatgatgtgcgcgctcatcgacggggtgattaagcaatccaatgtgctgggaaggccggttactttccgcagcatgtttgacgcgctctatgtttttgtcagcaccagaaaatcagggtaacgttcttcttgatttgacaaaaggtttagaaaagtctttcagaaagcgaggaactgccatgcgctacagagaaattatgatgtatatcattatggggatattcacgaccatcgtgaatatcgtcagtttttacattctgacgtcggcatttgagatggattacaaggcggcgactgtcgccgcttggattctgtccgttctatttgcttatgttacgaataaacggtatgtctttcagcaaaagaccgcggggatgcggagtctgatgaaagaattaacggcctttttcagcgtgcgggtactgtctctcgccatcgatctcgccatgatgattcttctggtcagtcaatttcatatgaacgaaacattggcgaaaatcgccgataacgtcattattgtagtcgtcaactatgcggccagcaagtggattgtcttcagaaaagcgaaagaagagggcgtgtcataaccgtttctttccgcgtcccggggggaaagtgtaatggtggaaggggatgcgtttgaagcgcaaaataaagaaagcgtttgctgatgtattcggggaatccgagacctgcgctttttctttgcgcccggcagagtgaatctcatcggagagctaacgggggccgctatgaggagaagacagagagaaaagctgacttttacacggcggatatcggcgccggagcgagagaactaaagggggatgacgatggcaattgagcggcacgtggaacgtttaatccagtacggattgcaaaaagagctgatttcatttcttgatattgaatatacaagaaaccgtttatatgaaactttgcatattacccatccggaggcttcagaacagaaagaaaatgaatcggcggcatcattgccggacatattggccccgatttatgaatgggcggcagaaacgggccggattgcagccgatacagacacctatcgcgacctgctgagcgcgaagatcatgggctgctttgccccgcagccgtccgagattgtgcgtcgttttgaagaaacaaaggcggtgcacgggccggagcaggcgacaaaggcgttttaccgattttcagaggatgtgtattatatccgttcggacagaatacagcggaatgtcggatggacggctgagacggcttacggaaagctggacatcacgatcaacctttcaaaaccggaaaaagatccgaaagcaattgccgctgccaaagagcagcctcaatccgattatccgggatgtgttctttgtaaagaaaatgtcgggtacgaggggagaccggatcacccggcgcgtcaaaaccttcgtgtcattccggtcattctcggcgatgagcagtggtttctgcaattttctccgtatgtgtattaccgggagcattgcatcgttttgaaagaccggcacgaaccgatgaagatcagcaaaaaaacgtttgaccggctgctgtcgttcgtcagccagtatcctcattattttctcggttccaatgctgatctgccgatcgtcggcggcagtattttaagccacgaccattttcaggggggccattatgaattcccgatggcgctggcggagacagaaagctggtacaggctgcctgactatccgaaaacggtgctgggaattgtgaagtggccgatgtcggtcatccgcctgcagagtgagtgcgcgtctgagctttccggcgcggcggatgccatcctgcgggcatggcgcggttattccgatgaggcggctgatctcctcgcctgttcaggagaaacaccgcacaatacaattacgccgattgcccggcggagaaacggtttattcgaattagatctcgtcctcagaaataaccgcacctctgatgagcatccgctgggaatttttcatccccatcaggaagttcatcacctgaaaaaagaaaatatcggactgattgaggtaatggggcttgcgattctgccgggccgccttgaacaagaaatgaaatacacggctgaagcgctgtgctcaccggacccggaggcggtcttaacggcagacccttctgcggcaaagcataaagattgggcgctcagtgtgctgcataagcggaaggtaacgaaagaaaacgcggaacagattctgaaagaggaaatcggccatgcctttgcgcggatactggagcatgccggcgtctttaaacagacagaagaaggcagagcggctttccggcggtttatccgccatttgggcgctctaccggaaaaaagccccatcccataagggacgaggcttttttttatcctctgcttctggcgatcaggctgaataagaataccacgatcgcagctccgatgattgccggaatgatggcaaagccggcaaggtgaggcccccatgtgccgagcagtccgtgcccgatccatgcgccgatcagaccggcgatcattgacccgatgattcccccgggcatactgccttttacaaataaacttccgatccagccgataataatagcgacaatcagagatacgataaaacccataaatatcacttcctattttttattatttatgcctatatgtttccttcgttttgtccatattaaacatatgaatgcgttttttataatgaacatatcaaggcgcgttccggtcttttttttcacaatgcgttgcgttaaaatggaaaccgtgtgaaaaggtgtgagcaaaggaaaaaatatttcttttgtagaatgtttaacaaaatgaaactttttgttgaccagcgatttttattatggtaaacctttatttggtattattcgttctcgctatcttttttctctatatatgctaaatgatctaaaactttttatgtttgatttacgcaagtggaaaaagctcatgcattttttgacgattttgtgacattaggtcgaaaaaaagatgaactttagaaaaaaataaagctaataagggcagattttgatagcataacaaggtagatagagaaaagattttgagaaagtacatttcagattcactacatcaataggaaggatggtgatcttcttgttcagagcatttaaaccgttacttttattagcgatgttggctgttgttttcgtactgggcggatgcagcgacatttccgttttagatccgaaaggacctgtagcagaccagcagaaagatctgattctcttgtcaatcggatttatgctgttcattgtcggcgtcgtattcgtactatttacaatcattttagtgaaataccgcgaccgcaaaggcaaagacagcggaaattacaagcccgagatgcacggcaacacgttcttagaagtagtctggacagtgatcccaattttaattgttattgcactttctgtgcctaccgtacagacgatatattcgttagaaaaagcgcctgaagcgacaaaggataaagagcctcttgttgtttatgctacttcggtagactggaaatgggtattcagctaccctgagcaggatattgagacggttaactacctgaacattcctgtagaccgtccggttttatttaaaatttcttcagcagattcaatggcatcgctatggattcctcagcttgggggacaaaaatacgcgatggcgggaatgctgatggatcaatacttacaggctgacaaagtgggaacatatgaaggccgcaacgcgaacttcaccggcgaacactttgccgaccagaaattcaacgtaaaagctgttacgcaaaaagactttaacagctgggtgaaaaaagcccaaagcgattctccaaagctgacgaaagagaagtatgacgaactgatgcttccggagaatgtcggaaaattaacgttctcttctacacacttaaaatacgttgaccacggccaagatgccgaatatgcgatggaggcgcgcaaacgccttggctacaaagccgtatcaccgcactctaaaacagacccgtgggaagatgtaaagaaaaacgaatttaaagtatccgacgataaacaagattgaaattgaacaagaaaggaggaagcccgaatgaaattgagatgggatgaattttttgtaacaggtgacccattaattctgggcgcacaagtttccattgcgctttccactatcgctatcatcgttgtactcacatacttcaaaaagtggaaatggctctggtctgaatggctgacgtctgtagaccataagaaacttggaatcatgtacattatctctgctgttatcatgctgttccgcggcggggtcgacggcttgatgatgcgcgcccagttagcgcttcctaataacagttttttagactcaaaccactataatgagatctttacgactcacggtacgatcatgattatcttcatggcgatgccgtttttaatcggtctgatcaacgttgtcgtacctttgcagatcggtgcgcgcgacgtagcattcccttacttgaacaacctgagtttctggacgttcttcgtaggtgcgatgcttttcaatatttctttcgttatcggaggttctccgaacgcaggatggacgagttacatgccgctggcaagcaacgacatgagtcccgggcctggtgagaacttctacctgctcggtcttcagattgccggtatcggtacgctgatgacgggtatcaactttatggtgacgatcctgaaaatgcgtacaaaaggcatgacgctgatgcgtatgccgatgttcacatggacgacgctgattacaatggttattatcgtattcgccttccctgttttgacagtggcattggcgctgttatcatttgaccgtttgttcggcgctcactttttcacgctggaagccggcggtatgccgatgctttgggctaacttgttctggatttggggacaccctgaagtatatatcgttatcttaccggcattcggtattttctctgaaattatttcagcgtttgcaagaaagcagttattcggttacaaagcgatggtcggctcaattatcgccatttccgtcctgagtttccttgtatggactcaccacttcttcacaatggggaacagtgcgtccgttaactctttcttctcgattacaacgatggcgatttcggttccgaccggggttaaaatctttaactggctctttacgatgtataaaggccggatcagttttacaacaccgatgctgtgggcgcttgcgttcatcccgaacttcgttgtcggcggggtaacaggggttatgcttgcgatggctgcagcggattatcaataccataatacgtacttcctcgtatctcacttccactatgtgctgatcgcgggtacggtatttgcatgtttcgcaggatttattttctggtatccgaaaatgttcggccacaagctgaacgaaagaatcggaaaatggttcttctggatctttatgatcggatttaatgtatgtttcttccctcaatacttcttggggctgcaaggtatgcctcgccgtatttacacttacggaccgaatgacggatggactgcattgaactttatttcaactgtcggagccttcatgatgggtgtcggattcttaatcctttgctacaacatctactacagcttccgctactctactcgcgagatcagcggagattcatggggcgtgggacgtacgcttgagtgggcgacttcatctgcgattccgccgcattacaactttgcggtgcttccagaagtgaaatctcaagatgcgtacctgcaattgaaagaagacaaaacggatattcatccggaaagcaagttcaagaaaatccatatgccgcacaactccggaagaccgcttattatgtcagtggcgttcggtattgctggcttcggacttgtatttgaatggttctggatgggcattgtcggcttgatcggcattctgctttgcatggtgcttcgttcatttgaatatgacaatggctactatatacctgttgaagaaataaaagagacggaaagaaagatttccgaataaaggaggcgtgatttatggaacatgcagaacacggcaattctaacgcgcctatggaatatcaatctgaaaccggcagactcaatattctcgggttttggatctttttaggggcagagattgtgttgttctcaacactatttgcaaccttcttcgttcttcaaagaagaacagcaggaggagtcttaccggctgaattatttgaagtgaagcttgtcatgatcatgacattcctgcttctgatcagcagtttcacctgcgggatcgctgttcatgaaatgcgtcgcggaagtttaaaaggcgtcgtcatttggacgatcattacgcttcttctcggtgcgggcttcgtcggatgtgagcttaacgagttcatccactatgtacatgaaggagcatctctcggtacaagtgctttctggtctggattcttcgtccttctgggaacgcacggaacgcacgtaacgatcggtatcttctggattgccggcatcttactgcaattgaagaaacgcggattaacgccgcagacgtcttcaaaaatctttatctcaagtttatactggcacttcttagacgttgtttggatcttcatctttacaggcgtctatctcatcggattggggggactataatatggcaaacaaatctgctgaacacagccactttccgtggaagcatatcgtaggttttgcgttgtctattattctgaccctgctggccctttgggttgcggtatatacggatttaagctcatcagcaaaactgtggatcattttcggattcgcatttatccaagccggtcttcagcttctcatgttcatgcacatgacagaaagcgaaaacggcgggattcaagtcggaaacacgctcttcggatttttcggagcgattgttatcatccttggttccatctggatctttgcggcgcactaccatcacggtgaccatatggatggaaaccctcctggcggtgcgaagcaacattccgaacatcaggaataaaaagaaaccctcttcgttcaggcgaagagggttttttgtgcctttattggcttcttctccggcgcaggcgcggaaggccgtaaatgataaaggcggcgatatgggcaacgatgacgttgacggcaaacaggatgatcatgagtgtgtggccgagaggggacaggctgctggttgcgtaaaagtagaagaaaacccacatgagaataattggcggtatggccgaaagagcgacttttttgttatccagccagataaagaggggtgttgcgcttgcgaccagtaaataagcaaaaaacatgtccatcttacatgtctcctttcattttatgggagcgtttccaaaatgaaatacagagaataaaatgtgtctgttttgtggtcgttttttgaacattttgttacaattattataccatgttttccaatttttgataccgctttatcgagaaatgtattgcaactattgcctcatttttggataggtacaagaaaccggaaaggtcaaataccctgtcacatttccggacaagggaatggcgcaggctgtgaacctttgctatgttcaaagaaaacatgcacagcgagggtggttttgaagtggacataacaaaagacgatgtcacagcgccggacgtcattgcgcttttgcaggagcatctgaagagcatgaccatgcattctcccccggaaagtatacacgcgctcaatgcggaccggctgcgtcagcctgacgttacgttttggagtgcgagggaaaacggcgtcctgctcggctgcggcgccttaatggagctaaacagccggcacggtgagatcaaatcaatgaaaacggctccgcatcatgtcagaaaaggcgcagccaaccggatcctccgccatatgcttgaagaagcaaggcggcggggctatcagcggatcagcttagaaaccggttctatggaggcttttctccccgccagacgcctgtatgaaaaagcagggtttcaatattgtgatccgtttgcacattataaagaggacccgaacagcttgtttatgacgttaaacatagactgaaaccccttttctgacgagaaggggttttttatcggaaaagtttcatcatgaccgaaacatttccttttctgacacgtcatatgtcgtgtagtccccaaaccgtaaaaaataaaaaggaagcaacctcatcatgttttcttgaacggtgttcatgtataataaacaatagtgacttccgatgaaaatgtaaggcgggatagaatgagtcgatataagaaacagcaaaatccctattatcagggggatttgatttttatatttggtgtgtttttaataattagtgttgcggcgatttatgcggccggacagttcgggcagtatggaggcagtgcctggatgaaacagattgtcttctatgttataggtgcgggattcatcggattattgctgtactttgatttagagcagcttgagaaactgagtctgtatgtattgattgccggcgtgctgtcgctgctccttttgcgtgtggcgccggaatccatcgcgccgatcaaaaacggagcgaagagctggtttcaaatcggcaactttaccctccagccctctgagtttacgaaaataggaattatgatgatggtcgcgtccattatatcgaaggcgggcccgaaagatcaaagatcacttcgggaagatgtcaatctgcttttgaaaattgcggcatggacggttattccaattgggatgatcgttttgcaggatgccggaacgggtgcgatctgtctgtttatcgttatggtgatggtgtttatgtcaggtgtaaactggaagctgatcaccatcatcggcggttcggccgcgcttgtgcttggcctattcttagtgcttgtaattgaatttccccatgtggcgaattcgatcggtattgcggattatcaaattaaccggattacatcgtggatgtctgactccagtgcggcaacgactcaggccgagagcgataaaagctggcaggtggatcaggccgttatggcgatcggatcgggcggcattaccggaaacggcgttcataatctgaaagtgtacgtacctgagggacagaccgactttatctttgcgattttgggtgaaagttttggatttttaggctgcgccattgcggttgtcatgtttttctttttaatttacaggcttgtggtgctgattgaccgcttgcatgcgtttaaccgatttggtgcgtttttttgcgtaggatttactgcacttatcgtgattcacaccttccagaacatcgggatgaatatcggcattatgccggttaccggtattccgctgctgtttgtcagctatggggggagctcggtgctttctacattaatcagcttcgggatcgtatataacgcaagtgtgcagctgacgaaatataaaagctacttgttcaattcttaatgtgagacggctcgtttttcgggctgtctttttttgtttagagcatttcgcttttggcatgatactctttcggatatgatatatagagaaggaggctttatatatgaacaataccatcgaaaccatacttaatcatcggtcgatccgatcatttactgacgagcttctgacagcagaagagatagatacattagtgaaaagcgcccaggcggcgtcaacgtccagttacgtgcaggcttactccatcatcggcgtaaccgataaggagaaaaagcggaagctggcggcactggccggaaaccagccttacgtcgaaaataacgggcacttgtttgtgttttgcgctgatttgtaccgccataaaaaacttgctgaggaaaaaggagaaaacattaccgagcttcttgagaatacggaaatgtttatggtcagcatcattgatgccgcacttgccgcacaaaacgtaagtgttgccgcggaatcaatgggactcggcatttgttatatcggaggcattcgaaatgaacttgatcaggtgacagaagtgcttggtacacctgaccatgtgctgccgctgttcggcttggtagtcggtcatcccgctcatccgtccggtcaaaagccgcgcctgccgaaacaagccgtatatcatgaaaacacgtacgatacgaatgaagaaaacttccgcagttatatgaaggaatatgatgaaaccatttccgattattatgataaacggacaaacggcaagcgggttgaaacgtggtctgatcaaatcctgcagttcatgaaacaaaaaccgagaacctatttaaatcaatatgtaaaagataaaggttttcaaaagaattaagaaaaaacctctcctgaccgggagaggtttttttatgtttcacgtgtaacatatttcgacaaaatggaacaaggtatataaatgtttatcatcagggatgctgataagcatacagaaagaaaaaacggcttagcagtggtacgatgttgatgaggtgacagtgatgatttcattaagtatattggatcaatctcctgtatcagaagggtgttctgcggaaagtgcactgcggaatacagtaagattggcgcaggaggcggaaaagctcggatataagaggttttgggtgtcagagcatcatttttcagagcggttggcgggctcaagccctgaagtgctgatcagccatattgcggcgaaaacgaatgacattcgggtaggatcaggcggtgtgatgcttccgcattacagcgcatataaagtggcggagaatttccgcgtgctcgaagggttgacgccgggcagaatcgatctcggattagggagagcgccgggcggaatgccgatcgcatcatgggcgctgaatgacggcgggaagcgtaatgctgatcaatatccgcagcagcttcgtgagctggcgatgtatttgcatgatgcagctgatgacaatcaccgttttccgaatctgaccgcatcaccccttattaagacggcgccggaagtctggcttctcggttcttcgggagaaagcgcgtttctgagcgcagaaatgggagcaggctatatgtttgcccattttattaatggagaaggcggagaaagcacgacagcacaatataagcgcagatttaaaccttctgcattaggtaaagaaccaaaaacggccgtggcggtgtttgtgctgtgcgcggatacggaggagaaagcggaggaactcgcggctgtcatggattatacgctgcttgcgggtgaacaggggattccgcttcacggcgtaccgtcttacgaaaccgtccgcggcaatacgtatacaccgtatgaacaaagacgaattgccgataatcggaatcggatgatcatcggaacgaagcagcaagtgaaagaacagattctggctctcagtaaagcatacggaacagaagaagtgatggctgtaaccattactcatcattttgaagataaacttcagtcataccgtctgcttcgagaagcttttgccgattaatcagaaagaaaccctgctgatgctccagcagggttgttcggttattcaatgataaaaggtttttcagtcagcacctggcttgatttccctttgttcgcggcataggccagcatataatattctcctgccggcagtgcggtgtcaccattgactttgccgttccagtcgaaatattgatagcctttatcctgctttttgtagatgccggcttggccgacaaagtcaagattactgtcatatacaaggaaggcaagctcttcggctccagccggaagataggtttcaatttggtaggttccctgcgttgtgccgtcctgtacgtcgattgacgttacgcgcggatagtccggctcttttacaatcagcagcgtcggcacttttgcgactgtttttccgccttcacgcactgtgacggttccctcataggtgcctgcctttacttttttggcattgacctttactttcgcattgacctttccggtttgatgagcggggatcacgacccggtctgtgcccgaaacggtaatgcccgtgccgttgaaagagtactcgagctgatatgattttctgatggacgattggttttcaatcgtaaaggtttcttttttcgtttcattgcctttgtctttcataaacgttccgtaagaataacttcccggggcgacaagggagtctgctttgatcgccttcatgattctgatgcttccggcgccttgcgcattatgcgggtatacgtcaccgtccgcgtccgttaaggtttccgccgtgttcataagagcggcttttatttgttccgggctccatttcggtttggcctgcttgatgacggcagctgcgccggctacatgcggggaagccatgctcgttccctgcttcgatccgtagccgtacgggtcggccggatcatgggtcggaatggtgctgacgatgtttacgccgggagcggagacgtcaggtttaatcatccacgtgtccataaccggaccgcgtgacgaaaagtctgccatttgttcagtgagcgatttagccacggataaatggaatgtcgcttttgtgccgcccgcttttaattggctgacgagtttttcgccgtcttctgatgaaagcttaaccgtcggcacggacatgcccggtacgttggcttcaatttctcccggggcattgttatacacaaccataccgatcgcgcccgcttttttggcgttgtctgctttatccacaaaggcgatgctgccccgtttgacgaccgcgacttttcctttcagatctttgccttcaaaatccttttgctcgccgatacccgcctctatgagctctgtttcttttttattcagtgcttttatgtcatcttctttgttgtaccccattactttcgctgaggaataggaaccgaaggagacggcgtactcgttcagcggcagctgtgtcgctccgacggagatagcttctctggacgctcccggagagccgacggtccaattgttcggcccgctgtttccgtttgatgtaacggccgtgacgccttctgacatcgcccagtcaagcgccgtgcttgtcgcccagtctgggttattcacagaattgccgagagaaaggttcatgacatccgctccgtcctgtacggcgcgttcaataccggcgatgacgttctccgttgttccgcttccgcccggaccgagcacacggtaggcaaggagtgtagcatccggcgctacgcctttaatcgttccgtttgccgctaccgtgcccgcgacatgggttccgtggtcagtcgacgcgcctctcggatcaccggacggcgtttcttcaggatcgtaatcgttatccacaaaatcgtatcctttatattgtccgaaatttttctttaagtcagggtgtttatattcgacaccggtgtcaataatggcaaccttgacgcctttccccgtatagccgagcttccacgcgtcatttgcccctatataaggcgcgctgtcatccatctgcggagacacggcatccttagatagggtgatgtctttatctttcagttgatcggtatgataggtgacgttcggataaaccgctttgacatcctgatcactcagcagtttcggaatttcatttgccgggagtttcatggagaagccggaaaacacttgctcatattccctgttgatttttccgtgtttaatggttttgagcgctttctttttcacttttgagcgttcgcttttcagcttgctttttgtctgtgctttgccgagttcctttgcttccgccagtgacttttccttcagctcgacgatgactgtcgtttgtttgccggtggtcatatcaatgtcaccaaatacctcagccttctcaagatcaggagtttgcggttttgaagccggcgcagcctgtgaacttgtggataaggtaaaggataagacaaaagccggaagcagataacggatgattccttttttcaatcgtgtttccccctttttctttatctaaattagaaatctagtatatatttcttgaaaattcaaaataatccttgtgacatatgactcatttatggaaattggtctgtgaataaggagggagttatacacagaatcctgtgcataactgaataaaattgtgtatatatattgttgggaacgagtgttcccatacaaaatatagatcgagtttgtggatatgtggatataccctgtgtttaagctgtgcttaaccaagggataaggtgtgtataactttttttatcggcttttccatttttcaggtcatttccatcagctttcaacaaaacttctgaaaactagtttgttttttcactcatattgtgacaaacaattcgcccggccgcgtctatcatagagtcatagggttgctagacccgctagtttttagcggagaaggatcggccgccttttccgttaaagcggagagaaaaacaggcctgcgaacaagctgtctgtcaaaaagaagcggagggatgatttgcaatgaaacgtttgctagtatctttacgggtgtggatggtctttctgatgaactggatggcgccgggtaacggaagatatccattagccgccgtgtacggaaaccaagcggcttatcataagaaagcgaagcggacggctggtgctttttcgtttgtgagccgagtccgatcggcggatttgaccgatgaaacgaaatcggcccgcggcaggctggataaaaaccgatggatgcctgtccgcaaagaattgccgaaacgggagcgcgcgggtccggcacctttacatcatatgaaaaagagggtacaatcccactaaacatatgaacgggagcgaacctcttgagaatagacaaagtattaaataacaatgcggcgttaataaaagaagacggacgggaaaagatcgtaatgggtcccggaatcgcttttcaaaagagaaaaaatgatgtgattcaaaaacataaaattgaaaaaatatttgtcgtgcacgacgaaaatgaaaagttcaaacaagtgttagaaacgcttcccgaagagcatatagaggcggctgaagatatcatcagccatgcggagggagagcttgcggcgcctttgaacgatcacatccacattgcgctggcggaccatttatcctttgcgatcgaaaggattcaaaacggccttcaggtgcacaaccgattgcttcatgaaattaaggcgctttataaaaaagaatatgaaatcggccgctgggcggttgaacacgtgaaacaaaccctcggtatatcattgcctgatgatgaggcggggtatatcgcgcttcatatccacactgccaaggcggatgccaaaagcatgtattcggcgatgaagcatacaaccatgatcaaagaaatgatcgaaaagatcgaatcctttttcgaacagaaggtggatgaagacagtatttcctatcagcgcctcgtcacgcacttacggtatgcggtcagccggttggactcaaatgaagcactccattccatggacgaggagatgctttatttcatccaaaaaaagtatccgtttgcttatcggtgtgcgcttgaactggcggcgtttttaaaaaatgaatatgatttggaactgccggaatccgaggccggctatattacgctgcatgtccagcgtctgcaaaaaaacccggaataacgcgtctgtttcgagaaacagactttttttttgaaaacatattgacgaaagcgctatcatgaaataaaatgaaagcgcattaaaaaactgaatcggcgggattgtgactggtaatgcaggcaagacctaaaatttgcgtacatgaaaaagggatcatgctgacctttttcgttggcgaattttaggtcttttttgattttagaaagggggatacatcatgaattatcaagaaacggcaaaacagcttatcaaacatatcggagggaaatcaaatatcatcagcgcgacacattgcgccacacggctcaggctcgtcattcaagatgaacagaagatcagccaggccgatattgaagagacagaaggagtaaaaggggctttcagcagctcggggcaatatcagattatattcggtaccggccttgtgaataaagtgtatgacgctttttcaaaagaagccgatttggggcgggaggatcgtgagacacatcaggacgcggcgaaaaaaaagctgaatccggccgcaagatttgcgaaaacactgtctaacatattcgttcccatcattccggctatcgtggcaagcggacttttaatggggctgctcggtatgatgaaggctttccactgggtgtctgaacaatcatcgctgtttaagcttttagacatgttttcaagcgcggcgtttatcttcctgcccgtattcatcgggttcagtgcggcgaaggaatttggcggcaatgcctatctcggtgccgtgctcgggggattatgatccatccggcgcttttgaatccgtgggggcttgcggatgcatcgcctgattttatgcaactcttcggcttcgacattgcgctgctcggctatcaagggacggtcatccccgtactgttagccgtttacattatgagcaaagtggaaaagggcacgagaaaaatggtgcctcacgcattcgacttattggtcaccccgtttgtcacggtgattgtcacaggatttatcacctttatcgcaatcggtccgcttggcagggcgatcggatcgggcattaccgtctcgctgacatatgtgtatgatcacgcgggcattgttgccggacttcttttcggcggtctttatccgcttattgtgctcaccggtgtgcatcacagctttcatgcgattgaggccggcctcatcgctgatttgggcagaaactatatccttcctatctggtcgatggcgaatgtcgctcagggcgcggcgggactggctgtatttttcctgacgaaaaaagcgaaaatgaaagaaatcgctctgcctgccgcattttccgcttttctcggcgtaaccgaaccagttattttcggtgtgaacctaaggtaccggaagccgtttatcgcgggaatgatcggcggagcgctgggaggggcctatgtcgtggtgaccggcgtcgccgccaatgcttacggtctgaccggaattccgatgattgccatcacggctccgctcggtttaggaaatcttataaactatctgatcggaatgggcatcgcctctgtctcggcgtttattgccgcttacattatgggagctaaagaaaaggaggccgtcaaatgaggacaccggatcaagagctgcgcctgcaggctgaggaagcgaaaaagaagcggcaagaaacagccgcgtcagatccataccgccagaactatcatgttatgccgccggtcgggcttttaaatgatccgaacggcgtcatccaatggaacggcgtatatcacttgttttttcaatggcagccatttcatacggggcacggcgcgaaattttgggcgcatgtgacgacgaaagatttcgttgagtggaaagaggaagaaatcgcgcttgcgccgggtgagtggtatgacaaaaacggctgttattccggaagcgccatcgaaaaagacgggcggctctgcctgatgtacacaggcaatgtccgtgacggagaaggaaatcgggaaacgtatcaatgcctcgccgtatccgaagacgggatcgtatttgaaaaaaaaggaatcgtcgtgcgtctcccaaaaggctataccgctcatttccgtgatccgaaggtttggaagaaagacggagcgtattacatggtgctcggcgcgcagacagaaaagctcaccggaagcgctgtattgttcacatcagagaacctgacggattggacgtttctcggttcgattgcgggggcggactcgggcggtctcgggtcattcggctatatgtgggaatgtcccgacctgttttctcttgacggaaccgacgtgctgctcgtatgtccgcaggggcttgaagccgacgggataaaatatcataacagccaccaggcgggctatttcctcggcaggctgcatacagagccgccagaatttaagcacggtgaatttacggagcttgacagaggatttgatttttatgcggcgcagacgctggaagatgataagggacggaggattctgttcgcgtggatgggcgttccggatcagcatgaggacaagcatccgacacatgcgtatcactggattcactgcttaacgatgccgagacagctgtcactgtccaacggcagaatcatacagcgcccgctcccggaaatgaaatcgcgccgcacggatgaacaaaagcgccgtcttcaattgaattgctcgtctgtaagcctcccggtgaaagatgcgtcccgggctgaagtgctgctggaagacattacttgcgaatccggttttgaaatctcaattcggggcgcggcccggtttatatttcatcaggaagaggggctggctgtgctggagcgcaccgctttcagcggagaagaaaaagaaaagagaagctgcgccatcagcgagctgcattccgtccagctctttctggatgcatcctccattgaattgtttttgaatgatggagaagaggtattcagcgccagatattttcctttcccgggaaatgatgacgtaaccgtcacttcggttgggaaaacggaaataaatgcctcaatttggacacttttgtagaaaatcgttcttttttcttatgtgaaacctatgccatctgtgctattcttcaaacgaaagcctatgattccaggaataaaaggagttgttttctcagttttgaaaaatcagaagatgacgccgaaatgtttacttgtcaaagctgcagagcaagtggaagataaacgggaagaatataaagaagtattgcttcagctgaatcgcatgctcaagagggctgagccgcacaatgaatggagtgatcggctgaggcatacatatgaacagatgaaggaatatgcgctgtttgtgcaatcgattgagatgtttttgcggtcatccgcgaaaaaaatgaaataatcccctcgatcatgagggggatatttattttattttccgctaagacgcatcgccgaatgtttagtcggtccgatgtattggttcagcgggaaggattctttgattgccgcagtgataaattcttttgccgcatagatggcttccttcacttcagcgcctttggccagttctgccgtcacggcggcggagaatgtgcatccggctccgtgcgtgtaaggtgtatcaatcatttcgctttctaatacttccgcggtttctccgtcatacagcacgtcgatcgctttttcatgtttcaatttgccgccgcctgtaatcaatacatatttcgcgccgagttcgtgaattttcttggccgcttctttcatgtcttccaccgtttttaattcatccataccgctcagctggcttgcttcaaacaggtttggcgtgatgacggttgccagcggcgccaattgggtgcgaagcgcttcggcatgctccggatacagcacttcgttcgctcctttgcagaccatgacaggatcaataacgacattcttcagctgtttttctttaatcgttttcgccgcaagctcgatgatctccacggtagggagcattcccgttttcatggcgtctacgccgattccgtcaacaatcgtcgccagctgtgcgcgaatcgtatcggcatcaatcggaaatacttgatgatcccagctgttctccgggtccatcgctacgatcacggtcaaagccgtcattccgtatacgtttttttcttgaaatgtttttaaatcggcctgaattcccgcgccgccgctggaatcagaaccggcaatagtaagtgctttgtgcattgacatatcaatggcctccatcagtgttttatatctcattatagttagattttctcccgatcacaatacggaaggcttggaggaatgatttgacagccgcggggatgtgcgtacaatacctacataagattactaggtaagggtgagaaaataaatgctcaacagggagcttgtaaagggaagcacggtcattctggtgctgacgctgctgaatgaacggcccatgtacgggtatgaacttgtgaaagaaatggagaaaagaagcgggaatgaactgcaaatgaaggaaggcacgctgtacccatcgcttcataagcttgaacgccaaagctatatttcttcttactgggaaaagcagaccaaagggcccgaccgaaaatattaccggatcaccgatgaaggaaaaaacattctagccgaacggacgaaggaatggaatctgttctccgctctgatggaccggatgctgaagcggggcgggcagaatggataaagacctttatgtgcacgaaatcagaaaagggctggaaggcaaggccggaagccgtgaattattaaaggaaatcgaaagccatattcatcatgccatttgtgttcatctggaaaaaggcaaaaccgaaagcgaagcgatggagcttattctgcgggaagtggggactccgtctgagattatctctgcttttcaaaaagcttcgacggtgcccgcgcggacttttatgctcttttatctgttctgcaactgcggtctttttgtgatgggggcgatgattacgatgatgcacgcgtggaggattcatcccgcagttgacgcgctgtggaaagggatttccgtgtcagtatggctgattatgatcggttatgtgctgtattggttccaaatcggctatcaagctggcaaagagttcggggctggcggcaaaaagcttgctgagcggacggtatgggcttcaatggtgccgaatctatgttttatgtttgtctttttgttcaatctggttccggctgggctgtttccttcggcggtcacaccgagttttgcggcagtatgcgccgttgtgacggtatgttttccgttttgcggcaaaataggtttttacgcaggcaggcagagacttgcctgatctttttcactatatacatagggaatctatataggggtgtttatatgagattaggttcgtggatgtacggcgcgtgcgcccaaatagccgttaccgtatttaccgtctgcggcttggttcttgccttgcccgttgtgagtctttttattatggttctgaatgggatgcaagacgctacttttgttgttttcagtattttgcttcttctattgttttatgcgctgggatggatttgggctgtttcgtttgcgcgtgagtggaaggtgaaacttttcgagctgcaggtcagctcgctcattccgctggcgggtatattatacttgtacattgacagcggggtgagtataccggaactgattcatgattggcatgaggatggatgtgcgcttgtcccgccggcttttgtctgcttgtgcacatgctatgcgatggtgttggtgcctgtttatcaatcaaaactgtggaatgccatggaggcgggcagacttaatgccaaggcggtatgcactgtttggggagaccttctgatcattctggttttgctggcggggatgacgtggatttgtttctgaatgggccgaaatcaaaaatccccctgatctctccgccgctttatgttttaatagaacatgagaaaaagcagaaggagcgggtcatgaatatatcaattgtcatagtcacgtataatcggattccggctttgtgtgagctgctggagtcgatttccaggcagaccataaagccttatgaagtgatcatcgtaaatgatgccggggaatcggtcgaacaagcgaagcagctgtacagcgatctgccgattcagattattgatttagaacagaatgccggacatgtggaagcgcggaacgcaggtgtgaaaaaagcgtggggtgattatatcatgctgtgcgatgatgatgatttcattacgccgggccatttggaaagaatgacggctgcacttgctgatgcggattttgtccattctgacgcggaaattgtgtcatttgaagaacggggcggcacgagatacccggtgtcacgaaagccgttcgcctatacggcggattttgcggatatgcgggtattttccacgtacgttccgtcaggcagcatgtacagacgttctctgcatgacacgttagggtattttgatccggatgtccataattattgggactgggacttttatttgcgcgccgcgaaacagcaccgtgtgaagcgtgttccttgcgcgagcgtcatatatgcgttttttgagggaggcggcaatcagtccgcggatctcggcggcaaacggaagcggtacttagaccggttaagcgaaaagcacgggcttggggagctcccgacgaaaaacttcgcggttcttctagaagagccggacatgaagaggcgggaggcgccgactgacattgtgtgggacggaaagcccgtccattcaagactgcacagttcataagggggacggacagtttgaaacagcttttaaaagacagctggtggaatcagctgaaagatgaatttgacaaaccgtattatcaagagctgagagagatgctgaaacaagaatacagcagccaaacgatttatcctgacagccatgatatttttaacgccttgcattatacgccctatgaggatgtaaaagcggtcattctcggacaggacccgtatcacgggccaggacaggcgcacgggcttagtttttccgttcagcccggggtcagacagccgccgtctttgaaaaatattttcatagagcttcaggacgatatcggctgccccgtaccgaaccacggatcgctcgtcagctgggcgaagcagggagtgcttttgttaaacacagtgcttacggttcgccgcggtcaggccaattcccacaaaggcaaggggtgggagcggctcactgaccgcatcattgatgtggtgaatgaaagagagaagccgattgtctttatcctgtgggggcgtcacgcgcagatgaaaaaagagcgcattgacacatcgaaacacattattattgaatcgactcatccgagcccgttttcggcaaggaacggttttttcgggagcagaccgttttcccgtacaaacgccgcccttgaaaaaatgggggagcagccgatcgattggtgcatccccgacctgccgcaataaacggttttttgaggcgcttccgcccggcggaagcgtcttttttgatgttccgggcggtatgccgtcagaaaaaataacaaactcaattctgcgatccgctcagaaatttgataaaatgcaggaagaagacaaattactgctggaggatttactcatgaacatacatatctctgctttaattcagaagatggaagaagaactgaggcaggcgaaaacggcgacccgcaccgaggaggtcaaaatgcacgcggccgccatccgctctctgtgtgatgtcgtgctcggcactcagacgcacaccgctccggcgcctgtgcagaatccgattccgaaagcggcgccgaaaccttccgcgtctccttcgacagacccgctgctgcttgaaaaaatgatgggcagcgccgggctgaaccaatatcagaaaaaagcgaaagacgaacgtgaggaagacggaaacggggattccattttcgatttttaacaggagaggttgattgacttgaaactgatactcgggggtttgcaatggacggcatttatgattgcggctgcgattgtagttcctgtcgccatcgcacaatcatttcacttgaaccatgccgattctgccgcattgattcagagcacattttttgtgcttggcgtcgctgcggtcatccaatgtctccagggacatcgtctgccgattaatgaaagcccggcaggcttatggtggggcgtatacacgatttacggcggactgacgggcacggtgtttgcgacattcggcgagacgctgcgggcgctgcagggggcgctgttattaagcgctgtctttttctttttgttcagcctttttaaagtgattgaacggctggccgtgctgtttacgccggttgtgaccggtgtgtatctgctgctgttggtcatgcagctgagtcagccgattgtgaaaggccttttgggcatcggctatttaaaaaacagcgtcgacggccttgtattcgggctcgcaatggttgtgacggcggcgatgttcatcatgtcccgatcgaatgttacgttcttaagacagtatgcgattctcctttcgcttgccggcggatggatcttattcgccgtcttcggcgctgccaaaccgattcaaataccggatcgcgtgattcagctgccggttctttttccgtttggaaaacccgtgtttgacagcggcctgatcattacgtcactcttcattaccgtgcttttgattgtcaacatgctcgcgagcatccgggttgtagaagcggcggtgaaaaaattcggcggcaccgttgggaaacggcgtgagcgtccggcagggtttgcggcttcgatcagccaccttttgagcgggctgtcagggggcattgcgcctgtgccgatttcaggggcggccggttttattgagacgacgaagcttccttcgaaaaagccgtttcttttgggaagtgtatttgtcatgatcatcagtatgatcccgctatttatgaatgcgtttgcgagtctgccctcaccggtcggctttgcggtaaacttcgtcgttttctccacgatggcgggtcttgcctttacggagtttgactcttatgagaaagcggagcaaaaacgaatccgttccattatcggtctggcgctcctcacgggggtcggcgtaatgtttgtgccggagagcgcgttatcagggatgcatccgatcctgatttcgctcttaagcaacggccttgtgctcggaacgctgctggcgatagcgattgaccgaatccagcttatcaaaaagaaaaaatccgacaatctcgtgtcatcggatgacggacgttgaattttgccgatgttgggttatgattgaattggaaactttaacgaaaaggcgggagaaaaatagatgaaagtgtttattattcttggtgcgattaacgctttattggccgtggcgctgggcgctttcggcgcgcatgggcttgaagggaaaatccccgataaatatttgcaggtgtggcacacaggcgtgcaatatcatatgtatcacgcgctcggtcttctggctgtcgcgtttttggctgaaaagctctctggcgcaggcagtgtttctgttgcgggctggctgatgtttgcgggcatcgttctgttttcaggaagcctgtacgtattgagcgtgacgcagatttccattctcggcgcgattacaccgctcggcggcgtggcgtttatcatctcttggattatgattatcgtcgcggccgtcaaatatttataaagaaaaaaagccaatcctctgtcaagtgagcgattggctttttgatttatctcggagaataagaagacatggagtacggataagtataagcgatttcctcatcaaatgtgatgtaatcaaggtaaatggtcagaagcagatagcgggtgcccgttttcggatcgctgatgatgatatggtcacgtcccgccgcctcaatcacaccgcggaaaatctttgaattccattctttgctgttttcgaatgtcatataaatcgtcgccgttttgccccggttcaaccgcagaatattttcaatgtatgactcttcaatcggcagcatgccgggaacgttttgtgacgatgatggacctgacgggatttgaaagctgccgccgccctgctgctgcggctggccggggaaccccccgccgaagccctgctggccttgctgcatcggcattgtcatttgctgctgcatcggcatcatttgtgatccttggccctgaggctgcggataaggattaggcccgagctgcggctggaatccctgcatatccattcccatccccatcccctgcatttgctgatattgattctttttcggtttcatattgttcctcctttgatgaaaacctcttgatgctgaaacctcctgacaagtatcagacagccgacagagcggctgctgtttttatctattccaccatatgagcccaaagaaagatttatgcgaaaaaagaaaatacgatccaatgtttccggatatcagagccggctttttttgtgcgcgcaatgctgacttttcacataatagtctgtatccctagcgcatcttccgcataaggaacatatgatagcggtagtttcaggtgcgaaaagggggtgacgagttgcctaaagtgtcagtgatcatgacgagctataacaaaagtgactatgtggcccgctctattaaaagtattctgtctcagacgtttacggactttgagctgttcattatggatgacaactcaaatgaagagacattggcggaaatacgtccttttctcacggatgaccgcgtccggttttatcaaagcgatgtatcgggcgtcaaagaaagaacggaaaaaacacgctacgccgccttgattaatcaggcaatagaaatggcggagggcgagtacgtgacgtatgcgaccgacgacaacacgtatgtgccggaacggcttgagaaaatggtgaaagagcttgatgaagacccggaaaaagccgtcgtgtattcaagttccaaaacctatcatctgaatcagcggaaagagacggtgaaggagacggccaggcccgccgaacggatcgtgtggaacgcgccgtgcgccattgaccattgttcggtcatgcaccggttttccgtgctggaacaggtcaaatcggcattcggttcctattgggatgaaagccccgcgttttaccgtatcggtgacgcccgttttttctggagagtgaatcatttttatccgttttacccgatttctgaggaacttgatatcaattatattaccgatcaatccatccattatcagcttttcgcggcggagaaaaacgagtttgtgaacagccttccgcagcagaccacgtgccgggagctgagggaatcattaaaaaagcttggaaaggggtgagggcttgtcggcatacttagcgaactattgggtgctgtaccggcagtatattgacctttttcagtcacttcgctacaaagacatcccgctcgcattgatcagtaatttttatcaatatatcagtccggcgcttcgggagagcatggagcagaacccggagcttttcggtccggcggatcagcatattcctgaagccggtattcagccttattatgatcaaaaaaggcaaaacattaagaaaacagatgagaaaccggtaaacggaaaagtcattctgcatttcgatcatcttcggttcaccgagggaaattaccggcagtttgatccggcaaaaacagcggtactggccagatggagtctgcctgaccatcatgggctgcccgttatctgcaaattggagctgacgggaatggggcaaaaagggaaccccgtcccttatattgaaaaagcccattccattttgaaagagcttcacagccatcccgctttcggaaacagagaatttcaggaacgactgtataaagacatcccgttatttattgaagcgattgacgccgttgatattttgtttacggccgagaagatttccgccgttgtagtcggcacgacggaggatatttacagccgtgtgctggcgctgatgtccgcgaaaaaaaacgccgtcagcatctgtcttcagcacggggcgctcatgggagatgaagcgtttctgcccgtatttacggactatcaggctgtattcggggcttatgaagcggagtggtataaagcaaaaggctgcagggaggaacaaatcatcatcacggggcatccccgtttcgacgagattttctcaagagagccgatagatcgggacacgttttaccgcaaactttcttttctcccgtcacagcggacggtgctgatcgccacgcagccgttttctgatgaattttatacgggagtgcttgaagagcttgccggccaaaagaacatgcagctcattattaaaccgcatccgtgggaaatcggcaaaaacaagctggatgcttacaatcaggtgctgcggaaatataaagcaggcaaaatcatcaaaaaagagatggagctgtatgatattctcccgtttgttgacgctgcggtgacacagacatcaacggtcggtcttgaagcgatgctgtttcaaaagcccgtgctgatcggaaaatcagcgggaacccgccgatacccttattatcattcacttggagaatttgtttttgaggacccgcaggcactcgctcaggaattaatccggatatgcgaaagccccgcagaatatcaaaaagcggaacaggcgcgccgtgcttttgtcgccgcgaactacccggttcaggattcgcttgccgctttatgtcaagtgcttcaggaaaaaaccggagtcagcttcagacgggttgacccttcataaaaaagataggagcgcaaaaaaaatggtgcaaaaaagatcagcttttcttccctattcattgcccatgatcgggaaggacgaaattcaggaggttattgatacacttgaatcgggctggctttcaaagggaccgaaagtagaggcgtttgaaaaagcctttgccgcctggacgggggcaaagcatgcgatcgcgctgaactcatgtaccgccgctttgtttttggccctgaaagcgaaagggatcggtcccggcgacgaggtcatcacgtctgccgtgacgttcagttcaacagccaatacaatcgtgcacacaggcgccgttccggtgtttgctgacatcgatccgcttacgctgaatgcagaccctgaaaaaattgaggcggccgtcaccccgcggacaaaagcgattgtacccgttcatttcgccgggcagtcgtgtgatatggatcaaattttggccattgccgaaaagcatcagttatttgtcttagaggatgccgcacatgccgtgtataccacttataaacagaaaatgatcggatcaatcggtgatgcgacggcattcagcttctacgcgacaaaaaacctggcaaccggtgaaggcggcatgctgacgacggacgatgacgggcttgccgatcagatcagggtgctcagccttcacggcatgagcaaaggcgcgtggaaccgctattcttcaaacggaagctggtactacgaggtcgaaacgcccggctataaaatgaatatgtttgatcttcaggcagcgcttgggcttcatcagctgaaacggattgacagcatgcagcaaagaagggctgaaattgctagccgctaccaggacgctttcagagacatgaaagggctcaccgtcccatatgtcagtgatgacgggcggcatgcatggcatctgtatgttcttcaaatagaggagcaggaggccgggatcagccggaacgatctgatttccgctttgaaagaccaatataatatcggcacaagtgttcattttattccggttccgttccatccgtattatcaaaaaacgtacggatataaggaaactgattttccggccgcggccgcgtattatcaccgcaccgtatcactccctctttatccgtcaatgacagatgatgacgttgaatacgtcattgcagccgttacggatatcgtcaaaggggctgattaggtgtacagactgagagaaaatcttgcacaggacatgattcatgccttcctgcatcagaagggcattcagcccgaagcctatgaatcgtcgctctgtttattggaagaaaacagccttcaaggcgtgattttatatgaaaactcttcgtgggaaagtcaattgttccgaaaaaatatcatcaatgtgaagcttgcagccgcaaacagcaccggacagctcaaaaggctgtttcaggaattttacgcggcaaggcgggcggacggcactgattttatatttattaaaataccagctgaagatatcggcgcgatgcaggtcgtgcagtcgcttccgaacgcttattttgtagggagtcttctcaagctcgtcagtccggtgcgtgtatataacagcacgccgccgtttgagattacagaagccggacccggcgacacggaagcgatcagccggctggcccgcgacgcctttacaaaaagcaggtattatcaggacccccatctcagctataaaagtgcaaaccgtctgtttgaagagtgggcgcggaataacgcggaaggcagagcttcgttacaattcctcgccaaatataagggagagaccgcgggctttgttcaggggctgtctaaaggcgatgaattcgtccttgatctgatggcggtaaagccgggatttgaaggaaaaggagcgggattccatttagctgcgcacgtgattgaacaatcattgcgctttcagcataagactgtatcagcgggaacgcagctccacaatgtaagagccatccgcctgtatgaaagaatgggatttaaagcggatgcgtccttttactactatcatgtgtggcccgggaaggaggcggactgatggcatcatgcaaaatcggaacgaagtcaatcggcgaaggttcgcccgtattcatcatcgccgaagccggaattaatcatgacggaaaactgagccaggcgtttgaattgatagatgcggccagtgaggccggcgcggatgcggtcaagttccaaatgtttcaggctgacaaaatgtatcagaaagaccccggcttatacaaaaccgctgcgggaaaaaacgtctctattttttctttggtgcaatcaatggaaatgcccgctgagtggatcgaaccgctgcttgaatattgtaagaaaaaaggcgtgctgtttttaagcacggtatgtgacgaaggctctgccgacttactgtatgcgacttccccttcagcttttaaaatcgcctcctacgagctgaaccatctgccgttattgaaatatgtcgcggggctgaagaccccgattatcttttccaccgcgggcgctgatatttcagatattcaggaggcttatcaaaccattaccggcgaggggaacaaagaaattgcgatcatgcattgtgtggcgaaatatcccgcgccgcctgaatacagcaatctgagcgtcattcccatgcttgccgccgcattcccggatgctgtgatcggtttctccgatcacagcgcccatccgtatgatgtgccgtgcgcggctgtcaggctcggagcgaaactgattgaaaagcattttacgatcgataaaaacctgcccggtgctgatcactccttcgccctcaatccggatgaattaaaagaaatggttgcggcgatccgctcagttgaagcggagctgcggcaggggcatcacgctccggtgccggaagtgctgtcgggaagctcccataaaacgacgacaccgattgaaggggatatcagaaggtttgcttacagaggcattttttcaacagcgccgattcaaaaaggcgaatattttacggcggaaaaccttgccgtccttcgtcccggccaaaaaccgcaggggcttcacccgagatattttgagcttttaactgacggcgcgcgtgcggtcagggatatccccgccgacacgggcatcacttgggatgaccttttgacgaaaggcagcccatatgatgactgacattttgtttatcattcaggcgcggatgggaagcgggcgtcttcccggcaaagtgctgaaaccgatcggcgggtatacgatcctcgatatgattgtcaaaagggttcgtcaaagtgcgttttacgatcaatcacgggataatctgatcgtcgccgcgtctgacagcaagaccgacgacattctgtctgcgcactgcctcagcaaccgctaccgtgtccaccgcggcagcgaacagcgtgtgcttgaccggtttgcacaagtcatcgaacaagtaaaaccggacatcgcagtcagactgacgggggataacccgtttgtcgacccttcgctgcttgattttctgattcaatcgcatttagatcagcacgcagactacacgtatatctgcggtacaccgctcgggatcggcggcgaggcggtgaacgcgcgccttttaacggagatcaatgcggacaaaacgctggcggacaaatatcaggagcatgtcacccttttgataagagaatcccctgagaggtaccggcttctctttcctgagcccccgcaggaactccgggctcctcacttgcggatgaccgtcgatacagaagaggactacaggctggcccgcgagctgtacgtaaaagcgggctcgcgtcctgatattccggcaaaagaattgatccatctgctgaatcgtgatccggagctcagggccattaatcaaatgatccggcaaaaagaggctgattagcgtgcgggttttgattttcgcggacgggggccgtgacatcggcatggggcacgcggttcggatgaagctgcttgccggtgccattaagaacaactgctcaataacgttctacacaaataaagaggcttcttcttatctatcatctgatcaatgggaagtgatcatcaagcctgacaagggacagaaggaatttattgtccgggaaataaacacgcgggctcccgaccttctcatattcgatctgctcgatatgccgtgtgactggctggaggaaatcaaaaagcattcatcggctcgtatcgtcttatttgaagaaaagagggaacatgtcattcatttatgcgatgccgttataaacggcatttacggcgggctgaaaagccggacggttcaaatgggcagcgccgcggtatatgaaggcccggattatatgattcttcatccgggttttgaaaaagcaaagcagctctatcagctgagaaaagaatgccgaaccatattggtctctttaggaggaagcgacccgaagaagcttgtctttaaagtgatggaagcatgccgccgcatccctgatattcagcggaaacgagtgatcatcgtcatgggcggcgcggcgcctcatgctgatgacgtgcgcgcgcatctcacacaaatgccttatgccgagatggtaaggcagacaaatgacatggccgcgcttctcacgagggctgatatggccatcgtgtccggcgggatcaccttatatgagaccatttgtacaggtgtgccctgcatcgttctttctcaagtggagcatcaaactgagacggcggaaaaattcgccgcacgagaggccgccgttcatctcggcctgggagaacacaccgcggcggacgtgctcgctcggcatatgtctgagctggctgctgattatccgagacggctcgggcttcatcagaacggaaagccgctggttgacggcaggggcattaaacgggcggcggcgattctttatgatttgtgataaaaccacacgtaaggaagtgttcatgtgaaaggtgttatcttagccggaggcaccggctcacgccttatgccgctgacaaaagcggtcaataagcatttactccctgtcggtccatatccgatgatttactggtcgatcatgaagctggaagaagcggggattacggatatcttgctgattacgcaaaaagaatatattccgcaatttcataaacttctcgaaaccggagaagagctcggcgtctcaatcacatatcaggttcagccagccgcatccggcatttccgacggtttatcatacgcaaagcggtttaccgggcgcgatccgttcgttctgcttttgggagataatatttttgaagattcattaaaaccttatacggagcgtttcgcaaagcagggaaaaggagcgaaagtgctgctgaaagaagttgacgatccggagcgcttcggcatcgccgagattgatgaggaaaacaaacggatcaagtcgatcattgaaaagccggagcagccgccgaccagactatgcgtcacggggatctacatgtacgacgcagaagtgttttcttatattgaacaaatttctccttcaaaacgcggcgaactggaaattacggatgtcaataatttatacattgaacacagtgagctgacgtatgatgtgttaacgggctggtgggtggatgcgggcacgcatgaatcgctctatctcgccggaagcctggcgcatcaggcattacagaaaggacaggagcattaatcatgccaaaatcatatttaattacagggggcgccggatttatcggccttaccttcacaaagatgatgctgaaagaaacagatgcgcagattaccgtcctggataatctcacgtatgcaagcaggccgcttgaaatagaagccttaaaaaagaacggccgtttccgttttatcaaaggtgacatttctgaaaaagaggacattgacaaagtcttttcccaaatgtatgacgctgtcattcattttgcggctgaatcccatgtggacagaagcataaatcaggcagagccgttcatcacaacaaatgtgatgggcacataccgactggccgacgcggtgttacagggaaaagccggcaggctgattcacatttccacagatgaggtgtacggagatttggcgccggatgatcccgcttttacagagacgacgccgctttctccgaacaatccgtattccgccagcaaggcaagctcagacctgcttgtcatgtcttatgtgaaaacccataagcttcctgccatcattacgagatgcagcaacaattacgggccgtaccagcaccacgagaaaatgattccgaccattatcaggcatgccgtaaacggcacgccggttccgctgtacggcgacgggatgcagatcagagactggctgtttgccgaagatcattgccgcgccattaagctcgtgctggaaaaaggaacactaggcgaaatttacaatatcggcggaggaaatgaacggacgaataaagagcttgcgtcatttatcatgaaggagctcggtgtcgaggaacggtttgctcatgtcgaagacagaaaagggcatgaccgccgttacgccatcaatgcttcaaagctgaaaaatgagctgggatggcggcaggacgtcacatttgaagaaggaatgagaagaaccattcgctggtatacagacagccaagactaatcggaaagaaggggatccgattgacgaaggtattagtaaccggagcggccggtcagctggggcgggagttatgccgccagctgaagcgggaagggtatgaagtgatcgccttgacaaaagcgatgatgaacatatccgaccagcgttcggtgcggcactcgttcagccattacaagccggatatcgtcgtcaatacggcggcatacacctccgttgacaaatgtgaaacggagctcgacaaagcgtatttaataaacggaatcggcgcttattatgccgcgcttgaggctgaaaacaccggcgcgaaattcattcacatcagcaccgattacgtcttcagcggcaaaggaacacggccataccagaccgatgatcccgcagatccgggcacgatttacggaaaaagcaaaaaactcggcgaagaactgatccggttaacgggaaaaaaccacaccattatcagaacgtcgtgggtgtacggcagcggcgggcacaactttgtcaatacgatgctgaaacttgcggatacacatgatcaggttcgtgtcgttaacgatcaagtcggagcgccgacgtacacaaaggatttagccgaaacggtgatcggtctgtttgacaggccgccgggcttgtaccacgccgcaaacagcggagtgtgcagctggtatgaatttgccaaggctatttttgaagaaagcggcagaaccgccgccgtgctgcccgtcacgacggaggaatacggaaatgagacgccgcgccccgcttactcggtgttgagtcttgagtcgattgaacggcaggggctcggcatgaggcattggcgggaagcgctaaaggattatttacaaagggagggacagtgcaagtgatcgaaggcgtaaaaattaaaaagctgatcaaacacagcgatgaccggggttttttctcagaactcgtccgtgacgatgaacatctcttagagcgtttcgggcaggcttcctggtccaaaagctatcccggcgtcattaaagcgtttcactatcatgagaaacaggatgacctgtggtttttcccgacgggccacgcccaggtcgtgctgcatgaccttcgcgaagagtcggcaaccaagggagaaacggatgtctactacatgggagaagacaatccgatgctccttctcattcccaaaggcgtcgcacacgggtacagagtgctgggcgaaaccccgctgaccattatttatttcacgacaatgtcctacaatccggatcagcctgacgaaaaaagaatcccgtggaatgatgagagcatcggatttgactggcagacggctcatcggtagcgcacaagacgaagacagcggatgtcttcgttttttgtgctggttcatctcgtgaaaaataaatgattgaatattccaaaaaataatttacttccatggataaaggtggtagattattctcaggaaaagagaaacccaattcgcgaatggaatcatcagacacgcttttccggcagaggacgctctgaatcctatatgatctggaggaattcatgatgttaaaaagaaaatcattttctgcctttctcatcagtgctgcggtattttcagctgtgttcttgccatcttttcatgcgaacgcccaatctgccgttattgaagcgaaaaccgtcaatagtacgaaagaatacgcgacgtctgatattgaagtcacatacaagccgaatgcgctgcttgccgtcggcgccgttgaatttcaatttcctgacgggttcaacgccactgtgagggactctgtaaacggaagaacactgaaagaaacgcaaattctcaactacggaaaaacggtcagacttccgcttacccttgacttattgggcgcgtctgaatacaatctcgtcctggtgcgtaaaaaccttccgcgcgcgggcacgtatacaattaaaggcgattacgtaaacggtttgggggccggcagtctctacgccgaaacaaagctggttattgacccgcgttaatccgggatgaaagaggctgacaacagcctctttttttatgcgcaaaatcctggcatgaatcttgcatataaaaaggggtgtaacgacaatgtgaaagggattgatgggttttggtgtaaaagcgcttacatttcgttctgccggtaattgaagcttacacgtaaaatacgatgaggtgataaaacatgtcagccaacccgctttctaaaagcactcagaaagatgaagaaaaagaagttcttaatttgttcttgtccacacaatcgatcataaaagaagccctgcgcaaactgggctatcctgacaatatgtatgaactgatgaaagagccgatgcggcttttgaccgtacgcatccccgtcaaaatggacaatggctcagtacaggttttcacgggctaccgctcacagcataatgacgcagtcggcccgacaaaagggggcgtgcggtttcacccggaagtcagtgaagaagaggttaaggcgctttccatctggatgactttaaaatgcggcatcacaaatcttccttacgggggcggaaaaggcggcatcatctgtgatccgcggacgatgtcattcggagagctggaacggctgagccgcggatatgtgcgcgcgatcagccagatcgtcggcccgacaaaggatattccggctcccgacgtatataccaactcgcagattatggcatggatgatggacgaatacagccgcctgagagaatttgattcaccgggattcattacgggcaaaccgattgttctcggcggttcacaggggcgggagacggcgaccgcgcaaggtgtcacgatttgtattgaggaagccgttaagaaaaaagggattccgttggaaaatgcgcggatcatcattcaggggttcggaaacgcggggagctttctcgctaaatttatgcatgacgccggcgccaaggtgatcggcatctcagacgcccacggggctttgtatgaccctgacggccttgacattgattacctgctggataagcgggacagcttcggcacggtgacgaatctcttctctgatgtcataacgaaccgggagctgctggaaaaggactgtgatattctcgtgcctgccgcaatctccaatcagataacggctgaaaacgcccatcacattaaagcctcaatcattgtggaggcggcgaacggcccgacaacgatagacgccacgaaaatcctgaatgaaagaggcgtgcttctcgtgccggacattttggcaagtgccggcggcgtgacggtgtcttattttgaatgggtgcaaaataatcaaggcttttactggtctgaggaagaagtcgccggaaaactgcgcagcgtcatggtgaattcgtttgaatccatttatcagacagcgcatacccacaaagtcgatatgcgtttggccgcctatatgacgggcatcagaaagtcggctgaagcggcccggttccgcggctgggtataagtgttatccgcaaagagattttgcatcagttatatagcggatcgcaaaatttctttgcgttttcagattgcagctgacaggttcggacaagcttcgtccgctttcggcaaagattttcctatttttatcacaaattgctatgctggtatgcttcttgcatcttcattaagcgtgagcacacattacaaaatacggggaggaattctaatgacagtttcatacgcacacgaaccatttacaaattttcaggaagagacaaataaacaatcgtttcaggaagcgctggcttatgtgaattcacagctcggcaagcattatccgcttatcatcaacggtgaagcgattgaaacggataaaaagatcatttccgtcaatccggcagataaaaaagaagtgatcggttctgtatcggcagccggaaaagaacttgcggaaaaggccatgcaggctgcgctgcaggcatttcaaacatggaaaaaagtacggccggaacaccgcgcgaatgtgctgtttaaggcggcggcgatcatccgcagaagaaagcacgaattctccgcgtacctggtgaaagaagcggggaaaccgtggaaggaagcggatgcggatacggcggaagcgatcgactttttagagtattacgcccgtcagatgctgaagctgaaagacggttctcctgtaaagagccgtgacggagaatataatcagtatcactatgagccgcttggggtgggaattgtcatttctccattcaacttcccgcttgcgattatggccggaacggcggcagccgccatcgtaacaggcaacacgatactgctgaaaccggcggatgcggcgcctgtcgtggcggcgaaattcgtagaagtgatgaaagaagcgggcctgccggacggcgtgctccaattcataccgggcgacggaggagaaatcggcgactatctcgttgagcatccgaagacgagatttgtgtcgtttacaggctcccgcgcggtcggatgccgcatctatgaacgcgccgcaaaagtacagccgggccaaaagtggctgaaacgggtcattgccgaaatgggagggaaagatacggtgcttgtagacagagatgctgatcttgatcttgccgcttcctcaatcgtgtattccgccttcggattctcaggccaaaaatgttcagccggttcgcgcgcggtcattcatcaggacgtctatgatgaagttgttgaaaaagccgtcgctttaacaaaatcactcaccgtcggaagtccggaagattttgatacatacatggggccagtcatccacgaagcatcttataataaagtcatgagttatatcgaaatcggcaaaacagaaggaaaactcctgacgggaggcgaaggtgatgattcaaaaggatactttattcagccgaccatttttgcggatgttgatgaaaacgcccgcctgatgcaggaggaaattttcgggccggtcgttgcgatctcaaaagcccgtgatttcgaccatatgcttgagattgccaataataccgattacggactgacgggcgctctgttatcgaaaacccgcgcgcacattgaacgcgcccgcgaagattttcacgtgggaaatctatacttcaaccgcggctgtacgggagcgattgtcggataccagccgttcggcggcttcaatatgtcaggaaccgattcaaaagccggaggacctgactatctgattcttcatatgcaggcaaaaacaacgtctgaagcctattaatctttcggaaatagcgcgatgaaaaagagagtcgcgctattttctctatatgagggtaagggggatggaacatgtatcagcagctcagcaaaatgcttccggaggagaaaatagaagccattacgaaatcactggtggcgttaaacagcatcaacggcacattgggagaaggaaaaaaagccgactatatcaaagatatgatcaagagctttccctactttcaggagaatccgtcacatgtgtgggagcaggcgattcctgaggacccttacggccgcaaaaatattttcgcatttattgagggaaacggcgaaagcctgaatacggtcatttatcacgctcatcttgatacggtcggcatcgaggatttcggccctttaaaagatatcgcttttgattccgaccgtctcgcggaatatttctcaaactatgaatttgatcgggatgtgcagcgggacgcccgctcaggcgagtggatgttcggaaggggttcggttgatatgcagagcggtattgccgttcatctcgccaatctgcttcacttttctgaacggcgcgatcagctgccgggccatattctgttcatggcaaacccggatgaagaaagccagcattccggcattttaaccagcatttctgaattaaaacggctgaaacaagaaaagcagcttcgttatttagcagcgattaataacgattttatcacgccgctgtatgagggtgacacgacaaggtacatatacacgggcgcggcagggaagcttttgccttgctttgcgatttacgggcgggaggtgcatgtcggagatacgctgtccggcatcgatccgaatttgatcgcgtcagaaatcaccagaagaattcacaacaatattcatatggcggaaaacattgaaggggagcttgtgcttccgccgacctgcctctaccagcgtgacaataaggaagcgtataacgtgcagaccgccgtcagcagctatgtctattttaattattttatttacgagaaaaccgccaaagaagtcatggatcagctgaccgccgtggctgacgaagcctgcaaagagacagaacaaaaattatctgattattacgacgaatactgtgagagaacgagcctgccgaaaaaagagatgtcatggaacgttcaagtgtacagtctggaagattacctgaaaaggctgagaagccgcgggatagaccctgcacagtgtatcgggcaggcatttaaaacatatgaacatcttgaactgcggatgagatgttttaaagccgtcgaagaactgcaaaaactcgatcctgagcagggagccaaggtcattattttctatgcgccgccttaccttccgcacaattatctgaaggaagaaagcacacgggaccggcttttgcagcatgtcattcaagaagcggtcgataaaacagcggcatcaaccggagaaacattcgtctttaaaaagtttttcccttatttggcggacggaagctttttatcgctgcatgaaacagatgaggaggtctccgcctttaccgataattttccgggctgggatgtcatcgggacgattccttttaatgaaatcagggaattgaatattccgtcggtcaatataggggtatacggaaaggacggccataaatggacggaacgcgtgtacaaaccgtacacattccatgtgctgccggaactcattcagcagacgacaatgcaccttttgcacagctgccgattagacatacgcacaaatggctgacataacggaataaggggatgtatatgcagggagataccaatcaaaatgaattgcagcgcacgatgaagggccggcatttgtttatgatcgccctcggcggcgtgatcgggacggggctttttctgggctccggttttacgatcagtgaagcgggaccgatcggcgcgatattggcttatgtgatcggcggatttttaatgtacctggtgatgctttgtttgggggagctcgcggttgccatgccggtcgcaggatcatttcaggcgtatgccgcaaagtttctcgggccgtcgacgggatttacgatcggatggatgtacgcattcagctgggccaatacagtggggcttgagctgacgtcggcggggattttaatgcagcgatggtttccggccgttccgatttgggtgtggtgcctggtatttggcgtcgtcattttttccattaacgcgctgtctgcgcggagttttgcggaaatggaattttggttttccagcattaaggtcatggccattgtattgtttattattctcggctgcgctgcggtattcggctttgtcggttttaacggcgggcagacggctccgtatctgtcaaactttacgacggacaaagggctttttccgaacggcgcccaagccgtgctgtttacccttgttatggtgaatttttcattccagggtaccgaactggtcggaatcgcctcgggagaaagcgaaaatccggaaaagacgcttccccgctcgatccgaaacgtcatatggcggacgctttttttcttcgtgctggcgatgtttgttctcgtgtccattttgccgtatcaaacggcaggcgtcatcgaaagcccgtttgtggctgtgctggataaaatcggcgttccttatgcggctgatatcatgaactttgtcattctgaccgccatgctgtcggtggcgaattccgggctgtacgcttcgtccagaatgatgtggtccctgtcaaaaactaagatgggccccgcttccttaacgaaactgacgaaaaaaggcgtgcctctgaaagctcttttcatcaccatcgccatctccggtttatccctgctgacaagtgtagtcgcggctgaaacggtgtatgtgtggctcatttccatctccggtatgattaccgtcgtcgcgtggatgtcaatctgcgcttcacaattcgttttccggagacgctttctcgctgaaggaggaaatctgaaggacctggcatttaaaacgcctctttatccgatcgtgccgattctcggattttcggtttacggtcttatcttaatcagtctcatctttatccccgaccagcgtatcggtctgtactgcggtgtcccgctgatgatcatctgttacgcgtattatcacttcggtatcaaaaaacgcctgaagcgtgagccggcttcttcggaaaaaggcgctgccggataagaaaaaaagcccttcgcttaaagcggcgggctttactttgtgtttcgtttggccgacagaacataggatagaacggcacagaactgaaaaccgaaaatgctgacggccatcggccaggcattttcttctccggcaataccgacaaggggagcggcagccgcaccgccgataaagggcaggagtccgagaagagccgcagcgcttcccgcgcctttctcctgtttctgcatagccaaagaaaatcccgtcgtcgtgacgatcccgacagaagaaacaatgatgaataaagaaatgcagactgccgccaggcctaaaccaaacgcaagtgataaaagcaaagcgatgctcccgatgacggcaatcatcagaccggagacaaacagcttccgttcatcatgtgttttggccatccgtccggtgatttgggtggcgcatatgattcccgcaccgtttacggcgaacagcaggctgaacatttgggccgatacgccgtagatgttttgcagtataaacggcgacccggcaatatatgcgaacatgccggtcatcacaaatgcctggctgagcgcaaatcccataaacatccggtcgccaagcaggccgcgaaacgtcatcagcgtctcccggagtccgccgcttgtccgcttttccggcgggagtgattcaggcaacaccgtaagcacggcggcagaaatgatacagccgattaccgccagcacgataaatacgattttccagccggcgaactgaaggataaatccccctgtaatcggcgctaaaatcggcgccgccccattgacgagcatcagtaatgagaaaaaagccgtcaattcttttccggaatacatatcgcgtgcggaagcccgtgcgatgacgattccggccgccccggtgaaaccttgaataaacctcatgacaattaaaaacgaaacagaagggctgaaggcgcataataaagaagacagcgtataaagcagcaatgacagaatcagcggcttccggcgcccgatcatatcactgagcggcccgacaacgatctgcccgacagccagacccaaaagacaaaacgtcaggctcagctgcgcaagtgacgctgtcgtatgaagatcggccgccacttcaggcaaagcgggcagatacatatcgagcgaaagcggcccgaatgaagcgagcgtcccgagaatcagtaccatgccgaggcctgcgcgggcggcctttgaatcagcgttattcatttcatgacccccaccttaacaaatgattctatcactatagcataaccagacggcgtattttatatcatttattgaatataaactaaatattttatttaaaaatctgaatgtaaataaaaaatcagaattagttttcatgtgaaatgtaaaatgaaatataaggatgctaaactataaaacaacaaaagatagaaaagttttacggaagaggtgttcaaagagcatgaacagcaaacaaaccgatcacatcgaaacgaaacgccgatttccggtctgtctcgcgcttgctttgacattaggcgtatttgccgcgggttctgaagagctggtgatttctccgctgcttccggatttagcgcgggctttcagctcggatgtcagtgtgctggcgctttccatcagtatttacggagtgatgatttttatcggggcgccgcttctcgttccgctgggagataaatattcccgggaactcagtctgctggcgggactgcttatatttacggccggcacggtgatctgcgcgctggcgcacaatctctttttcttctttctgggcagggcgctttccgggcttgcggcgggtgcgtttgtgccgacagcatatgcggtggtcggcgaccgtgtgccttatgcgtaccgcggcaaggtgatgggtctgatcgtgtcaagctggtcgctcgctttgattttcggcgttccgatcggctcttttatcggcggcgttttgaattggcggtggacgttttggattttcgccctcatgtctgtcctcgttgcttcgctcattttcattgaggcgcgccgcagcacggcggatgggaataaaacagaagaggaaaacggacggcaggcaggcactttccgggatgcgctgaaggtgccccgtgtccctgtatatctcacgatcactttttgcaacatgatcggtttttacggcatgtattcctttctcggcacatatcttcaccgcgtgctgccgggtgggaatacagcttcagggctgctgatcatggtgtacggaatcggtttttccatgagcgtgttcaccggaaaaatcgcagataaggcggggaaaatgcgctctttgatcgcggcattggccgtgatcagcatatggctttcctgtctcgcctatgcgccgtcatcaatgccgtttttggtcatcgggttattcgtctggggattgatgcaaagcctgacggtgaccttgctcagcactattttaagtgattgctcacagagccgccggggcaaaatcatggcattttacagtctggcgtccaatttggccgtcaccttgggttctgctgtcatgggtccggtctatgtcggatatggatatgcagctgtcggatttatctgtgcggccgtcaccctcatcggctttgtcctcagcgttttcgcatacagaaggtatggaaaatatgagcataagaccgaccaatcattgtatcggtaaaataaagtttctataattttgtaaatgtaaatttttaacaccttatattataaggtgttttctaatatataggaataattatcaatattttcaaataatattgacagcttgaacgtctatggataatatttacttaaaatttaacagattggttggtgctcatgattatattggataatagcattcaaacaaaaagcaaggcttattcaatatctaaactgattacgatcaacacgctcggtcctgaagggacaagcagtgagtacgcagcaaaaaacttcatcaccaatttcacccttctccaaggggtgaacagcaaattatcattgcatgatacatttgaatcgtgcattgaaaaaacgcttcaaagtccgctggaatacacaattgtgcctcacgcgtatgacggcattaagcacttctacatgagaccggatctgcagcttctgcaaattttcaggtgcgacaccccgatgtacggcctggctgtccggcccggttttgaatatacggatgacatgcttgataagactgtcatcgtatcccacccgtctcctatcaatttgattaagtattttacccgtaaagatgtcacgtttgatctggtgaactcaacgagcgcagccgcgaaaagagtgaaggacggtttgtccgacatcgcgctgacaaatgagctggccagacaaaagtacggccttcactttgtcaaaacatttaaaagcattcccatgagctggtcattattcggaaaaggagagattcatgatgaaaactgaacaagatttgcaggaactttatttcccgacgcctaaattaatagaatgggataacggagtaagacaatattcgtccgtcagaggcgatacggaagttctgctttcttacgttccgccgcatacaaacgtggaaccgcatcagcataaggaagtccaaatcggccttgtcgtttccggcgagctgtccatgactgtcggagatgtcacaagaaagatgacagcgctggaatcagcctatatcgcgcctcctaacgtgcctcacggcgcaagaaatgagacggatctagaagtgatcgccattgatattaaacgcctgaaagccggtgaaacctatacaagccctgaggattattttttgaatatttttaaaacgagagacttattgcctgggatggaagtcacgttcttcgtggaagactgggtggaaatcatgcttgccaacattccgggcaacggaggagaaatgccgttccataaacaccgcaatgaacagatcggcatctgcatcggcggtggctatgatatgaccattgaaggctgcaaagtggatatgacattcggtacagcttatttctgcgatccgagagaagatcacggcgccatcaacagatttgaaaaagattcaaaatcagtcaatatctttttccctccgcgctataacagagcaaaagcgaaaaaattagaggcgaaagagtcatgaacctgacggataaaacggtcctcatcacagggggcgcatcaggcatcggttatgccgcggttcaggcgtttctgaatcaagaggcgaatgtggtcgtcgcggatattgatgaggcgcagggagaagcgatgatccggaaagaaaacaatgacaggctgcattttgtgcagacggatattacagatgaaccggcatgtcaaaacgccatccggtcagcggttgacaagttcggcggattggatgtgttaatcaataacgccggcatcgaaattgtcgccccgattcatgagatggagctgagcgattgggacaaagtgctcaacgtcaatctgacgggcatgtttcttatgagcaagcacgcgctcaagtatatgctcaaaagcggcaagggcaatatcattaacacgtgctccgtcggaggagtcgtcgcatggcccgacattcccgcatataacgcctctaaaggcggcgtactgcagctgacgcgttcgatggccgtcgattacgccaaacacaacatccgcgtcaattgcgtgtgcccgggaatcattgacacacctttgaatgaaaagtcgttccttgaaaacaacgaaggcacgcttgaagaaatcaaaaaagaaaaagcgaaagtcaatccgctgctgagactcggcaagcctgaagaaatagcgaacgtcatgctgtttctcgcttcggatttatcaagctatatgaccggaagcgcgatcaccgcagacggtggatacaccgcacaatagagaaggagtgtttacatatggagagaaaaacagtattggttatcgctgaccttgggggatgcccgccgcatatgttttacaaaagcgcagccgaaaaatacaacctcgtcagctttattccgagaccttttgcaattacagcctctcatgcggcattaattgaaaaatactcgattgcggtcattaaagataaagactattttaagagtctggctgattttgagcatcccgattcgatttactgggctcatgaagatcatgacaaacctgaggaagaagtcgtcgaagaaatcgtcaaggtggctgacatgttcgcggttgacgccattacgaccaacaatgaactgtttatcgctccgatggcaaaagcgtgtgaacgtctcggcctgcggggagcgggcgtacaggccgctgaaaatgccagagataaaaacaaaatgagagccgccttcaaccgggccggcgtcaagtctatcaaaaataaacgggtgacgacgctggaagatttccgcgccgcgcttcaggaaatcggaacgccgcttattctgaagcctacatatctggcgagctccatcggcgtgacgctcatcaaagagagggaaacggcagaagcagaatttaacaaagtcaatgaatacctgaagtcgattaacgtaccgaaagcggtcacgtttgaagcgccttttatcgcggaagaatttttgcagggcgagtatgacgactggtacgaaacaagcggttattccgactatatcagcatagaaggcatcatggccgacggggaatacttccctgtggcgattcatgataaaacaccgcaaatcggattcacggagacatcgcatattacgccgtccatcctggatgatgacgcaaagcggaaaattgtcgaagctgccaaaaaggcgaatgaaggactcggcctcgaaaactgcgcgacacatacagaaattaaattaatgaaaaaccgggaagccggactgattgaatcagcggcgcgatttgcgggctggaacatgattccgaatattaaaaaggtcttcggcgtcgacatggcgcagctgttattggatgttctctgtttcggaaaagaagccgatctgccgaaaggattattggagcaggagccatgttatgtcgccgactgccacttgtatcctcagcatttcaaagagaacggccagctgcctgagacagctgtcgatttcgtcattgaaagcattgacattcccgacggcgtcttaaagggagacaccgaactcgtttctttctcggctgccgaggcgggtacatccgtggatctgcggctgttcgaagcgttcaacagcattgcggcgtttgagctgaaaggaagcaattcgggtgacgtggccgaatcaatcaaacaaattcagcagcaggcgaagctgactgcaaagtatgcgttaccggtatgaaacagctgaaaccgaactcgaagtatttgcttttcgggcaggcgctttcgtttatgggagactattgcgttctcccggccctgctcattttgtctacatactatcatgactactgggtgacgtccggcgttatcgcggtccgcagcattccgatggtgtttcagccgtttttaggcgtgctcgtggacaggctcgacagggtgaaaatcatgctgtggacggatgtgatcagaggtgtcatctttttggggctgacatttctcccgaaaggcgaatatccgctgctttttctggcgctgctgtttgtctcgtacggaagcggcgtgttttttaacccggcacgtctcgcggtcatgtcgtctttagaagcggatattaaaaatatcaacactttgtttgcaaaagccacgacgatttcgattattgtcggcgctgcagccggcggactttttctgttaggcggttctgtggagcttgccgtcgcgtttaacggggtgacctatcttgtctccgcgtttttcatcagccgcattaagcttcaatacgtgccgattcagtcagaaaacgtaagagaagcttttcagtcgtttaaagaaggcctgaaggaaatcaaaacaaatgcttttgtgttaaacgccatgttcacgatgattacgatggcgcttttgtggggtgtcgtctacagctatttcccgattgtcagccgctttttaggcgacggggaaatcggcaatttcatcctgacgttctgtatcggcttcggcggctttatcggcgccgctcttgtcagcaaatggggctttaacaacaataaagggctgatgtattttacagtgttatcgatcgtctcgcttgcgctgtttttgtttaccccgattttcgccgtgtcagtcattgccgccattcttttctttatcgcaatggaatacggtgaagtgctggcaaaggtcaaagttcaggagaacgctgcgaaccagattcagggccggatcttttcggtggcggaggcgtccatcggattgtgcatcgccgccggttccatgctgatcaacattgtagacgcggcagtcatcatggcgtttatcgtccttttggtcagcgggctgtttctgcatacaaaactggtcaataaatccttttcagaacggaataacgaatcagagcaaatccatttataaggagccttccagatggaaatcataccgtccgatgtcatcaagacacttccgaaacaggaattttcgctcgtttttcaaaaggtaaaagagatggagaaaacgggagcccagattattaatctcggccaggggaatcccgatctccccactccgccgcatatcgttgaagcattgcgggaagctgcgctgaatccttcatatcacggatacggccctttcagaggctatccgtttctgaaagaagccatcgcggaattttatgagagagagtacggggtatcggtcaatccggagacagaagtcgcgctgttcggcggagggaaagcaggtttgtacgttttgacgcaatgcctgctgaaccccggcgatatcgccttagtcccgaaccccggctaccctgagtatttatcgggaatcacaatggccagagcggagctgcatgagatgccgcttcatccggaaaacggctatctgccggattttgagcggattgatcccgccgtcctgaaaaaagccaagctgatgtttttgaattacccgaataacccgacgggcgcgactgcggatcaggcgttttatgaaaaagcggctgcgtttgcaaaaaaatatgacatccatcttattcacgattttgcatacggcgcgttcgaatttgatcagaacccggccagctttcttcaggcgaaagaagcgaaaacggtcggcgcggagctttattcattttcgaaaaccttcaatatggcaggctggagaatggcatttgccgtggggaatgagaaaatcattcaggcggtcaatgagtttcaggatcacgtcttcgtcggcatgttcggcggccttcagcaggcggcagcggcggcgctgtcaggaaatcctgagcatacggagcgtctgaagcgcacatataaagaacggattgattttttcacggcgttatgtgaaaaggaattaggctggagcattgaaaaaccgaaagggactttttatgtctgggctgaaattccgaatgaattcgagtcttcacaccagttttcggactatctgctggagcatgcccatgttgtcgtgacgcccggcgagattttcggcagcggcggaaagcgttatgtcagaatatcaatggtggcaaaacagggcgatttaagggaattcgtgctgcggattcaaaagctaggtttgtcctttccttcattacaagaaacatcccgctgagagcgggatgtttttattatatgcttttcatgctgccgccgtcggctgacacttgctgtccggtaatataggaggcttcttcagaggcaagaaaggcagccagcgccgcggtttcttccgcagttccgacacgcttcatcgggacgcctgaggcaatccgttcctccgcttccgctttagaaatgccgttttgcttcatgacattctttacgaattggtgataacggtctgtggcgataaatccgggattcagacagttgacagtaatgtgaaaaggcgcaagctgaatggcgatgtttttgctggcattaattaaagcggcgttcatcatgctgttggtaaacatattggcgccgggttctttccataggtttccgacgatattaatgattctgccgaattcgtgctgtttcatgatcgctgcggccgttttcatagagtcgatataggcgatcgttttattcgtaaaggtatttgtcatatcctctatatcgcagctttcaaaggtatccggcgagccgcccggaatgttgttgatcaatacatcaagccgtccgcattgtgatctgatctcttcaaaaatgccggctctcgccttctggtccgacatatcgccggccagaacggtgacgcccgcatccggatgtttggcgaggatctcttcttttaccgattcgatattttcgggaactcgtgaattaatgacggtatgaaagccattgtccgccagtttcagagcgatcgctttgccgatcccctggctggctcccataataaatgcggttcgttttgacaactgtctgcacccctttaccaaaatggaatctcctttacatcgtaaaaaaaaatgataaaaatagcaaattttatttaaattctgacaaagaaaaaacccgccggacaggcgggtgggtgttacacgtgcaaaaacttcggaagcgtgtcaagagacaagcggtttccgacaaaaaatgaaccgaattctccgtagcgcgcgctgacttcatcaaagcgcatttcataaacaagttttttgaactgaagcacatcatcgctgaagagcgtgacgccccattcgtaatcgtcaaaaccgacagaccccgtgataatctgtttgactttgccggcatagctccgtccgatcaagccgtggcttctcatcaggtttctgcgttcatccatagaaagcatgtaccagttgtcgttgccgcttcttcttttatccatcggatagaagcagacgtatttcgcttccggcagctcaggatacaggcgtgcgcggacatgcgggttttcatacggatcgccttctccgcttgcgaggtagttgctcagctcaaccacggacacgtaagagtaagccgggatcgtaaattcagcaagctttgatttgttaaattcaagctcgatttcgttcagctcttccattgtcgggcgaagaatcatcagcatgaaatcagctttctgtccgacgatgctgtagatggtttgcgagcctttgccttctttttgggcgacgccccatttttcaagcagtcccgtaaattcgtgaataatcgacaggcgctcatcgctggataacatcttccatgacgtccagtccattgtgcggaaatcgtgaagcgcgtaccagccgtcaagtgtttgggcggcttcgttcgttttttgctgctcactcatgtatcttcactcctatatcttttcattacattgatgccttcactatatcacagtttaaccgtttcggctgtggagaaaccttgaataatccgaagccttgtgtcagaaactaagccgtgaaacaaaccgtcaattaaattagttagaaaaataagatttctttttgaaagcgctataatagaagttggttatttgaatttagctggaagaagagtatgctgtaaaagtaagcgttttttgtcaacatagaggagggaatatcgtggcagatttatttacaaaagtacaagaaaaagtcgcaggaaaagatgtgaaaatcgtatttcctgaagggttggacgaacgtatcctggttgcggtcaacaacttggcgggcaacaaggtattaaagccgatcgtagtcggcaataaagaagacattcaagcaaaagcgaaagaattaaatcttacgcttgacggcgtggacatttttgacccgcatacatatgaaggcatggaagaactcgttcaggctttcgtagaacgccgcaaaggcaaagcgacggaagaacaggcccgcaaagctttgctggacgaaaactatttcggcacgatgcttgtgtacaaaggtctcgcggacggacttgtcagcggagccgcacattctacagccgatacggtgcgccctgcactgcaaatcatcaaaacaaaagaaggcgtgaaaaaaacatcaggcgtcttcatcatggcccgcggtgacgagcagtatgtgttcgctgattgcgcgatcaacattgctcctgacagccaggaccttgccgaaatcgccattgaaagcgccaatacggctcaaatgtttgacattgacccgcgcgttgccatgctcagcttctctacaaaaggatcggcgaaatcagacgagacggacaaagtggctgaagccgtgaaaattgcgaaggaaaaagcgcctgagcttacgcttgacggcgaattccaattcgacgctgcatttgtgccgtctgtcgcggagaaaaaagcgccggactccgacattaaaggagacgcgaatgtatttgtattcccaagccttgaagcaggaaacatcggctacaaaatcgctcagcgcttaggcggctttgaagcggtcggaccgattctgcaaggattgaatatgcctgtaaacgatctttccagaggatgtaatgcggaagacgtctacaatcttgcgttaattacggctgctcaagcgctgtaatccgcaaaagccggtctttacgaggaccggctttttttatagaaagaatgtcactgcggcccagccgaacagggacaaacagagagaaccgatcaagcctgctgcgagcgcccgccagccgctatgacgaaacgccgatatatggactttcaaaccgagacccgccatcgccatgccgattaaaacataagacacttgaacaagaaacgcggaaaacgaagctgaaataacgcctgatgtatggatggcgctcattccgagaaatccgaagataaaccaagggatggggagcgaagcggcagaagccgtctttgactttccgctgcggcgcgcccgcattccgagcatgaatgcggccgggacgagcagcgcgacccgggtcagtttgacgatcaccgccatctcgacggctgcttttcctccggcgctgccggccgccgccgcatgcgccacttcgtgaagcgttgccccgcaaaaggccccgtaagccgcaggagaaaaccccaatccatgataagcaagagaatatacaacagtaaaaacggttcctaataacgaaacggcggccgcgctgatggcggctgcattttcatttgatctgatctgcggcgcgatcgcggcaatggcagccgccccgcagatcgctgtgccgcaggctgtcagcgtgctgagtgtctgatctatacggaacagccgggacagtccgtatacaacggcacccgcaaacatcatacagcagacggcaattgcaaatacgtgccagcccgcatgatagatatccgccagattcagtctcatgccaagcaggatgatgcctgctttcagcaagtatttgcttgagaacgcgatccccggctctaatgccgcccgctgtccgaatacggcgcgccagagcatgccgatcagcatggcaaggacaagcattccgagcatatgcaaaaacggcaggcggctgacatagaaagccgcaaacgcaattcctgcggtaactgaaataccctttatcatcttcatctcagtcacttcccattatcttgataactccactttactgcggtcttaatcattagtaaaatatatttatatgatctaaacgattaggaaaaataatgattaggggcgatgctttttgtattacggggaactgaaaacattcattgccgtcgtggaagaaaaaaactttacaaaggcggcgcagaagctgatgatttctcagccaagcgtcagccttcacattaaaaacctggagaaagaatttcaaaccgctttgctgaaccgctctccgaagcactttacgacgacgccgacgggggacattctctatcagcgcgccaagcagatggtctttttgtacgaacaggcgaaatctgaaatttacgcccaccatcattatgtcaaagggaagctcaaaatcgccgcgagctttaccatcggcgaatatattctgccgccgcttctcgcaaagcttcatgacgagtatcccgagctgaacctggacgtcatgatcggaaacacggaggaggtcagcgaagcggttcggatgcttcaagccgatatcggattaattgaagggcatacggggaaaaacgagctcgacattcagccgtttatggaggatgaattgtgcattgccgcaccgaacggacacccgctcgccggcagaaaaaacatcccggctgccgaattgcaaaatcaagcgtgggtgacaagggagaagggttcgggaacgagggaatatttagaccacgtccttcaatcaaacggactgcggccgaaatccatgatgacgatcagcagcaaccagggtgtcaaggaagccgtgatcagcggaatgggtctttccgttctgtcaaaaagcgtgctgcaaaaggatctgcttcacggcagcatttccgtgcttgagataaaaggattctccttaaaacggaaactgtctatcatccaatcttccattatggagaacacaaaaaacaaagaaatcttcatcgctcttttgaaaagccaatttcaatcatctcaagcggagtgatataataaacgcatggaaagcttatgacgaaagggatttaatatagatgggaaagcaaccgattgatttactgatgcagccgagctggagaatcattgaccaatccagccttggcccttattttgatgcgaagcagtcattcgcaatggatgatacgctgtgcgcctccgtaggcaaaggggaatcgcctgcgacggcacgcacttgggtgcaccaccggacgatcgtgctcggcattcaggacacacgcctgccgtttttagaggacggcgtgaaattgctggagggcgaaggctaccgtgtcattgtccgcaattccgggggcctcgcggtcgttctcgatgaaggcgtattgaatatttctcttatttttgaagatgagaaaaaaggcatcgacattgacagaggctacgaggcgatgacagagctggtgcggcggatgctgtgtccgtacaatgccgaaattgaagcatatgaaattaaaggatcgtactgtccgggcagctatgatctcagcatcggcggccgaaaattcgcgggaatctcacaaagacgcctgcggggcggaaccgcggttcagatttacctctgtgccgataaaagcggaagcgaacgcgccgatctgatcagacgtttctatcaagccgctttaaaagacaaaagcaacgatacaaaaggcgtatatcccgatatccggcccgaaacgatggcttcattaagcgaattgctgcaaacggacattaccgtgcaggacttaatgctggcgcttttgactgaactgaaggaactcagcggacgcctgtatgcagccggattatcgccggaagaggaaatggtatttgaaaaaaatctgatccgaatgctggaacggaatgagaaggtgttcggcacgcaggaaagcttggactgagtccgggcttttttatttttggtaattatatactattcagttatagtgaaaaagaatcgttatatcaaaactagtttacattatataccttatttgattaatatatttatgtaggttccaaataattctataaactgaaggagatggagatatgaactttaaaaaaataaaagaagaaaaaagaatcacgatccctacacatttgttagccggagatgcggaacaatcaggcaattctttcgcttggagcggctgggtgcttgtagtgccgagccaagaagacaatcaaaacccgaatttgaatttctctgatttagccgctcaaaagtaagataatgactgtttggagcctacgcattcgagacgaggcggtgagagtgtgacacaagagtatataagagaaattaagcggggagcactgtcatggattgttgaaaatatccattattttgatatgaaacataaagtagcgaatgatttcagatggcgccttaaaacatttatagaactcatttttcttaccaattacctgatcagaaatcaggcagatgataaggaagttgctgttttaacggagtttattacagaaaggctccgtaatgatcagcttgaagaatttattcattttgatccggacggtctcgccggattggctattgcgggtgaatttcttaccttgactgatcatccgtcacaagcttcagtgatatgggagctggaaaaattcacggcagcgcgttttgattgcagccttgctaaaattccctttcgaaaaatggatctgaagtacagtctgcaaagagcaggcgtaacctcggaaataacggatttttctgacttatatcactacacagcagctggtcaggatatcccaaatacatatatgacggatcatgatgcatacagtatcactcatacgattttttatataacagacatgggatgttcttctcttacggataaagagtatcatctgtcgtccttaaaagaaaaggtcctgaaatttctcgggatctatatctgtcttgagaatttagatattaccagtgaattattgatgtgcagctcttttttacatatcgacatggataaggacaaccataaaccgctctatgaagcagcctggaataaaatctatcggggccaaatgaaagaggggaatgtcccgagcatcacctatcaacataaacccggtttgaaaggtgaacagcgaagagaagatgtgtttaaacattgctatcatacaacacttgtcgccgcgggtgccgcgcatgcctgccttagagcagaaaggaacgattaacttgaacagattagctgaagagacggatcaatttttattatcttttgctgaacaatcgcttccggatcaaaagagcattcagctgtttgccggcttctgcaaatactacagaaagacgagccattcttccgctgtaaaagaacatactgaaaggattgcctccgctttcgttgataagtcatgctgggaagatctgtttcactgtaacacggccattgtcaatgagttgattcatatctatttaacggcaaaagcttataaaaagaagcagggaatggattcggatgatcaagtcatacgtcacggattgcaaaacggctatcttataaaaaaagaatggccttattttaaatacgccgaattcgccggtttgctgaacgagctgggaatgtcaactgaccatgaaaaagtgcgcttttacaagaattcgatatttcagcctttgctccatgacgcatggaaaagaacagctgaaaacgagctggagtttgtcgagtactgtcttcttcatttagatcagggagagcatctgcttcatcccggcttgaaggcgtccattcaaaaatggcttgtgttttgtctcggcagccgaaaaatgaaacagctgtgcaatatgttatttatccaatcgtgtatcgatccatttttttatggctgtcaagcggctcttcatcatataaataacgagaatccatccattcattgtgctccggctcttctgccggcgattgagattctgaatctggagtgtggaacatgcggatagtcaaggaacattttaatataaaaaaacagaagaatggctgctgggtttttggaagaacattcagctgcagccggaagaaatggaagcagatgatctcatgcacctgttttgcggtttagcggcatgtcatcactttgaaaaaagaaaggatacagaagaagtcattctattcttagaccgttattttggagaaaaaacgcacgaatgccatccggtcctgttcgcgtatgcgtatcatatataccgcaggatgaatgccgcaaaaagcatcttttttcataacggacttgaacaaatggtccgcggtttacaagaggaactgaaatcagagccttcctctatgatcctcatggtgttagcagcttattttggggcggtgaccccggaagaactgatcgttttcttagaaaccgcaatgaaacgtgaggccgatttgctcatggcaccgggcagcatccaggaagagcaggcagatgccctttatgccgtctcttatttgcaaatgaaaaaattgcagccttttctcacggaatggtacaaaacatcagactttgctttttcaggtttaatgttagccgagtgcagaaagtatcacattgacgccgttgcaaaatacacagccattatgaaatttctccgattcgatgaggcgctttttatacgggaagggcgggaatttctacgctttcagcagcgaagcagcggaagcttcggttatttaaatccattagcgatggaccaaggggcggtcagcggcaaattgctggaccgtcaatatttcctgccgtccgctcattatgccgccgcctctctgtctatgctgtaatgtctctcttttgaaagacggaaaaagaaatcaataaacaaataagaaagtagatcgctataaccgtcacggaataggggatgtttaacgttgaaatcgcatcacccgcacttttatttacataagcaacgaggtttaaatgcggaaagagtgtaaatttataccatgtaaattgggcaagcaaatcagttccgcccaatatactgccggcaaacagcagtaaaatggataagcaaagggagagcgcctggcttttgcacaatactgacaaagtgaacgcaatggtgacaatacttataattgatatgaaacgcaaaagcagaatgattccggatgctttgattgaactgatggtatacagactgtcatttaaatgagtatagacgagcggatatgaagcattggaaaaaccgaataacacgccgccgatcagcaaacagctcacacagtaaaataagtaaaccatgccggtaaacagaagagaggccagaaatttcgatgttaaaatccgccatcttcggttcgggcttgtagcgataaacttaatcgtcccaagggcaaactctttagaaacaaccccgctgacggttaaaatcgcagtcaagcttacgaaaatctcaagcccgtttgaagtaaccgtgccgaaaaacctccagccgttccattcataagggttgatgttatgctccaaataatagtctttattcttaacatcagcagaataataaacgcctgccgtttcagccggtttattaatttcttcctgttttttttcggcgagaagccgttctttccaattgttatccgaggaagcatctaactcatgattcataataaggccggccagcaaaacgatgagaaacaggaaaaaaagagataaaagtgtgcctttttttcgggttatttttatgaattcgttctgcgtcagatgaaatatgctcataccgcgtcctcctgatctgtaatcatcatgtatttctcttccaatgacaaagtccttgcagaaacgcgggaaatcagaatctctttctctgccaaagttttaatgatatacgggatggtatcttcctccgcttccaattcaatgatgcggctgtctttttgctgtacttgaagaataccgtcctgctctaatatttctttcgcccttgccggatgatcgaccgtgacggtaaacagctttttctgaccaaggtcatttctgctcttcatgtcttcaattcctaaaatccgtccctttttaatgtaggcaaccctgtcgcaaatctcctccatttctgacaataaatggcttgataataaaatggaaaccccttgcttcgctaaatcggaaagaatgatgcgcaattctttcatacctttaggatcgagaccgttcatcggttcatccagaattaataacccgggattgtgaagaagagaataagcgagccccaagcgctgtttcatgcctaatgagaaatgtttcacttttttgcgggcagcctgctccagtccgacttttgcaagggtattcataaggtcatccgttcgcagcgaggtgctgcgcagtttagtaaaatattttaggttttgcaaagcggtcatattcggatacatatccgggccttcaatgataaccccgatatgtctcataaaatattcaaagtcgctgtccggtctgcctctgaatgaaatggctccttctgtttttttaataagctgtacgatcattctgaaaatagtggttttacctgagccgttcggccctaaaaggccgaatatctcgccttttctcacatcgaaagaaattgactgtacaataggggtatgattgatggttttagagacatcttttaatatcagggctggttcactcatgctacttgcacaccttccttatgatttagggtaaaagccgtcaaaaccgaagaacatgcttccgatcaggccggcagcgattaaaatgagagcaatgctataccacatttttcgattcaatggtttccctccttacaatgctgacattccatttgaaatagcgcaaaaagatgcggaatatcagtttcgaaagatcaaatccggccataaacaccgccatacccgctccgaggaccatacatccgttaaaaatggctgttacaatcggcacttttatgaggagaaagaatgatccggtcatcagcatcaggccgattgccatcaaacttaacaccgcaacagaggcaaaaagaaacggtgtcagcataaacatgaagttgaacatgcccatacccagcatcaggccgaatgctttgaaaaaggagcgccatgttttctgctcctcggcatcactgatgaaaatatccgcttttaaggcgcgcgcaagtgttttggggtttcctaaattgccggcgatttgttcatcgctttttccttcagcgacgcccatttggaatatttcgccgatatcggcgagtatctctttttgctcaaattccggcagatcttttatttcccgccggagatgttttaaatattggtctttacacattcattttccctccttaatgatgctgttcactttttcggacaggtcaagccattccgattttaatgtgtgatgataaaaggcgccttcttctgttactttgtaatatttgcgtgacgggccttgatctgaagctgctgtatacgtttttaaatagttatttttcgtaagtcttcgtaatatggggtagatggtgccctccgatacagggaacgtttcacttatgaccttgattaattcataaccatataaatcttcataaagaagcagggacaacacacaaagttccaatgctccttttcgtaattggctactcatttactatcattcccatcatatctaataattgtattctctatacagtgtattgcacagtagctaatcgatcaataattcccaagaaccatttgggatgaggaattgaatctttatgcttatgtgcgggcggggaccgagatgcgcagcccttgcgggaagaaggcctcctgaacaatgtttacattaatatagatcaggatgcgcgtcattgacaaatggcaaaaacccctttttccatgacaagaaaaggggttttttgcgttattcggccattttttctaaattgccgttccggtccattttaaaggacggagacgcatgctcgtcgtcttcaaataaaactagttttctggctctgttcataattttcaccaaggtttcgtagtcttcctgaatggttttttgatctttttcaagtttttcgacggccgcttccagctgctcggttttagactgaagttcttggttttcccgttttaaacggtcattttccatctgcagggcggaagtttgctttccgctgccttcatagctctgcagaaattgaatgacgtctgccattgtgagctccgccttttggctcggctgctgaggcgccagcaaatgtgataaactagctaactcttccttgaagctttcatcgacataaggcatatgttcgccggacatgacggcttgccgatcctcttttggcgcttccgtttgaaccgtctcttcggctgcggtttcttgaatgatgtccgcatccggtgcaggcggctggtataatagtttcttcttggccggctggccgtttccgagcgcgcgcatccgctgtttccgctgtttttttgcaagctgaagcgctttttcatattgatggcgcacgacggcattccatctgaatccgcacgctgccgacgttctgtttaatttatcgcctacctcttcaaaggcgttcagctgcgtgcttccttcccggacgtgccggagcacggtttccgcaagcagcaggtcattttcctccgaccaggcgtcctgtctttgctttgtcaatgttctcaacccccaataatctttgatggtattagaatgtccagattggaaaatatttatacaaattggctgaaagaatgagagatacgcagagccttgcaggataagatgaatccttgtacaataaaacgtgatgtgatttttttcgtttttaaaatttaagatttaacatagaggaacattgaatgaagggaagcgtacatcatggctaatgaattccgagtgtgtgatgattgccaggccaccaatattaagacattgctgccgcgtttgaaagaagctgacccggatgcaaaagtggaggtcggatgtcagtcatattgcgggcccggacgcaagaaatcgtttgctttcgtaaacaaccgcccgctgtcggcgccgactgaggacgagctgattgagaaagtgaaaaagaagatcaaaaagtaaatgtgcatttttacgacagcctcgcccgatgggtcaggcttttttgcttcaaaaaatcaatgattgaaaactggaacaaaacgccggacaaattcaaggatgttttcaaattacagagccgatataatagaatcacggctaaaaaaaagagggaatgacgatggcgtatccaaacggaaaattatcagaagaaaaagtgtttaaagatcccgttcaccgctatgttcatgtgcgggacaagctgatctgggatttgatcggcacccgtgaatttcagcggctgcgccggatcaaacagctcggtacgacgtatttgacgtttcacggcgcggaacacagccgttttaaccattctctcggcgtctatgagattgtcagacgaatggttgatgatgtttttaaagggcgtcctgaatgggatgacaatgaacgcgaactctgtctcagcgccgcgcttttgcacgatttgggacatgggccgttttcgcattcctttgaaaaggtttttcatctggatcatgaagactatacgagggaaatcattctcggcgacaccgaggtgaatcaggttctcagaaaggcgggaccgggatttccgcaggatgttgccgaagtcattgccaaaacatacaaaaacaaacaggtggtcagcctgatttcgagccagattgacgccgacaggatggattaccttcagcgggacgcatactatacgggcgtcagctacggacattttgatatggaacggattttaagggtcatgcgtccgcgagaggaccagatcgtcattaagcaaagcggcatgcacgccgtcgaagactatattatgagccgctatcaaatgtactggcaggtgtattttcatcccgtgacgagaagcgctgaagtcattttgacgaaaattctccaccgtgcgaagcagctccatgaagaagggtatatattcactcatgctcccgttcatttttattccatttttgaagggaagctgacgcttgcggattatctgaagcttgatgaagccatcattttatattatttccaggcttgggaggaagaagaggacccgattctgtccgacttgtgccgccgcttcattaaccgccagctgtttcaatatgccgaatttaatccgaatgaggaaatgtcggcttattttgaactgaccgctctctttaaagaggcgggaattgatcccaattactatttagtggtcgattcttcatcggatctgccgtatgatttttaccggccgggtgaagaggaggagcgtctgccgattcatctgttaacgcagaacggccagatcaaagagctgtccaggcagtccgccattgtcgaatccatttcgggcaaacgccggacggaccataagctctactatccgatggacctcatttgcgacgattcagaaaaccctgaagcaaaattaaaaatccggcagctgctgggactgacatagaaggattttggtaaagaaggaaaaggagatgtcgggaatttgttgaaagaacatgcaaaactgatgaaggtgttctcggattctggagaaatcatcgggcggaaaaagctgcagaaaatcatttatatcgcgaagaaaatgcagtatcctttctacgaaaaatatgattttcatttttacggcccgtattccgaagaactgacgcttcgaattgaagagctgtgcaatcttgggtttctggatgaggtgaaggaaaaaaagggcggctactttcaataccggtactcgctgacggagacgggagccgagtttttacatcatgcggagcttaagatgccggatatgaagaagtacatcgacagcgtcaacagccgctcatcccggtttctggagctggtgtctacgattttgtattttgacggccttgaagctgaggaaaagaaagagaaagtgtttacgataaaaagcaaacagaaatatacggatgaagaatatgatgaggcgcttcactacatagaagagctgaaacacatttgttaaaggcgatgctttcgtctttttttatgaaaaaaccaggccgcgatgaagcgggcctggttttgtttattgtctcaatttgctgtgcttgtacgaatataaaaagtaaacgatgacgccgatgatcagccagacggcaaaataaagccacgttttcagcggcagattgaccattaaaaacaaacagcagataatggccaaaatcggcagtacgggtacaaaaggcactttaaatccccgtggcagatccttatgggtgcggcgcagaatcagtacggacagactgaccatggcaaatgtcaatagcgcgccgatgtttgagagatccgacagctctttcagatcaacaaaacccgcgatgcatgcgctgatcagtccgatcagccacgtattaaagatcggcgctcccgatttctttccgacaatggtaaagactttcggcagcattccgtctcttgccatcgcaaaagatatacgggtcgccgcataggtatgagcaagaacgacggccatcagtccgatcaccgcaccggcagcgataatgcccgccaccgcgttttgtccgacagtctgcagcacataagacatggcttccggcacattaagctgtgaatacggaaccatacccgtcatgacgagacagacgatgacgtataccaatgtacagatcaccagtgaaccgataataccgatcggcaggttgcgctgcggttttttgacttcttcagccgaagccgaaatcgcgtcaaacccgagaaacgcaaaaaagacggcagaagcccccgtaatgacgcctttaattccaaaaggcataaaaggatgccaattgcccggctttacaaaaaagcttcctgtgatgataaacagcaaaacaattccgatttttacgagaaccattatattattaaaggttttgctctctttagagccgcgtgacagaacgacggcaattaatagagtaatgatgatggcaggaaggttgacgatcccccctggctcggcacgtgcagcagactgtccggcaaaggcatgccgatttcggctaacagattattaaaataacttgaccagccgcttgccaccgctgacgccgtcaccatataaacggataagagcgtccagcccattaaatggccgacaatttctcccatggtggtataagagtaaatataggcgcttccgtaaaccgggagaacagaagcgatttcggcgtaacataatgctgcaaggctgcagacaacggctgcaatgataaaagaaaagattacggaaggcccggcgtttttcgcggctgtaatgcctgtaagaaccatgacgcccgtcccgatgacggcgccgatgcccagtaatgttaaatcaaatccacccatcgttttggcagtctgcctttttctgctttgttcaagcagctgggtgatgtcttttttttgtaggatattccgcaacacgcatccctccatccaaaagcaaaagccaagagggactctttggcttttacccgtgtcacatcttctgtgtaatcgacaatcctgtgttctgtttccccgtctgttccgtttcttttcttttccaatcatattgtctgccgcatccgatcagattatccttaccgtcaaacgcagtcacccttaatgattttacctgaatcgtgtctataaaaccagcattgcataaaaggatatggtaaaaaagagggagacaaaagtctgtgcagggcaggataaaagttgcgggcattccggccggaattttgactttctccgtaaggtatcagtaaaatgtaataaaaaacaaacaaatgatgatggatgcatcttgaaatggggagtttctgcatgaagcacgataacttgcaagcaaatgtactggattacgcgctcacgaaatatttaaagagcacgaaaaagcttgatgaggcgacaattccaaagagtataaacaatatcagaggatttattctgaggattatttaccggcacggcacgtgcacgattaaagatatattgcaggaggtcacattatcgccttccgccacgacaaccgctctcaatcatttagaaaaagaaggattcgtggaaaggtcgagaaacaatgaagaccgccgcacggtatggatgacgctttccgaatcgggaaaaatggcggccatgcaaatgattgaaaaccggcagctgctcattgacgaactgttcgaagcattgacagaggaagaaaagaaaatctttttcagcctggttgaaaaggttgtgaaataagccggcctgacatagcagcgccggccattatcaaggattactccgtatcgctgatccgtttgccggcgacggcgtaatgatcctttctcatttcttcaatcatgacaatgatcttttcttcggctgcgccagtcgtttcttttacggcttcggtcactttttcaaccagattccgtttttgttcatctgtgcggccttcaagcattttaacggttacgagcggcatggtgctgatcctcctttatcgtttcctctctttggaagagagatcacttatagtatactgaatgaaggacaatcttgcatttttaaaaaaaggggattttgacatttggacagatttttatattatccgctggagcttatgccctatgtcgtgattacgctgatcgtggcatttacgatgcatgaactggcgcacgcgtatgtcgcgtatcggttcggagacgataccgcggcgagacagggcagattaacgctcaatccgattaaacatcttgatgttttcggaacgattctaattttggtcgcgggtttcggctgggcccgtccggtgccggtgaaccgccgcgcctttaaaagaccgcggctggcgggagtgctagtttccgtcgccgggcccgtaagcaacctgcttcttgcctttatcggtttctttttgctagtgttgatgcatgcttacggaatggagctgctttctgcattcagcatggggcttgaccgctttttctctatttggattcagctgaatctcgcgctgtgtttattcaacctgctgccgcttcctccgcttgacggctaccggattattgaggatctcgtgccgccgcgggtgcgcgccaaaatgactcagtttgagagctacgggattatcgtgtttctcgtgctgtttgtgacaccggtcggctcctatgtcgtgtggccgctgttaagcgaggggagagactggattctcaaggtatttgccattatatttcaaccgcttttgtaggagggtattttcatggaagaaaaaaagaagaaaacaatcggatttaatattattaaaagtgatccgaccgacggacatggcggttttggcgccgggtcgctgagccttgacaatatttctccggtatttgtcgatgtggaagagaaggaagctttcgtagacatcggcgcaatgcatgcccgcagtgtcgttgaaaaaggcatcaaattcctgccgaacaaagatgaagtgccgaacggaaaaccgtactggctcgtgtgggtcaccatcgacagaaaaaaagaaggcccttattacgcgggtgtgacggcttgtgaaatgaccgtggacagaagtatccgcagaggctataagtcattgccggagcatgtgaatttaatggataaatcaatgaagcgccgcattatcgtggacaaaatggacgccagctcaaagcaggtgcttgctgaatttctgcagaagcatgaccaagggctctgggaacgttcatccgatgaattgaaaacaggtctgcttccgggcgaaaaataatttgtgaactttttgtgaactttataaatatttgcactatttcgcaattgtactgagtaaactgttgatacagaatcaggacatggaaagtcccgagccgaaccaagactcggggtttttcatgtttacgcggaggtttcatcatgttcaccgtctttgacatcgggccttggatcattgaagcagatacggcggaaacgagaaaacaatatgaaaaatcatgggctgatccctgcgattgcgggagctgccggaacttttccgaggcggtgaatctccttcccgccgagaaaacaagattgtttacgcagtttgggattcgtccggctgtctgtcacgatttgggggagcatggaaaggaaaacggcctgcatcattatgcgggcagctatccgattgtcggcatgcttagggaaggctggccgaagtttcacattgagagagcgggagatatccgcttttcgttttctttgcctagtacaacattttttataccgaagggttttcctgaccctattatccatctcgacttttcactcttgctcccatgggtgcttgaggaagacgcggattaagcccggcgcgcaatgcaccgggctcagtcttttttgccgagccacttatcccaccactttttgcgcggagcttctttacgggcggggacgtgttccttttcttttttagacggttccggtccgtagcacacatccgcgggctcagtgcctgcgatgaaatacgtgtaatgctttgcggcgcatccgggtcccgaagtgtagccggaagcggggtcaatatagacgcccgtgacgcccttcggcggtttaagcgctatttccggttctccttcgagcgccttctccataaagtccgcccaaatcgtcttcgcatagcttttttcttctactgaatcaatcgtgctgcttttgtcatagcctgtccacacaccggcggcaagagcccgattaaagccgatcatccagctgtctgcgctggtcgtgcctgatttcccgccgtacgtccgggtcagccggtctgaaatggtgcgtcccgtgacggaagtatagccgtttaaatcctcatcaaacatgcccgtcatcatgctcgccgtcacaaaagcggcttttttatcaagcgtctgctgatgtccgcgcggctgttcatacaagaccttgccggcggtatccgtcacttttgtgataaaggaaggggtgatttgttttcccccgtttgcgagcatcgcataggcattaaccatctcaatcgggcgcacgggttcagttccgagcgccagagacggaaggggctttaaatgttcgctgatgccgaattcctttgccgccgacacgagcttattcatgccgagaaagagatgggtcttcacggcataaatgttgtctgataacgcaagcgcctgaagcagcgtaatcggtttattggcgtagtagccgttgtaattgcttggagaataggtatctccgttgtcgtcaatctggaactctgtggcttcgcttttcatcagcgtgaccggtgtaaagccgctttgaatcgctttgtaatacaaaagcggcttgatcgtggaagccggctgccgtttcgcctgtgtcgcccggtcaaacgggcttttttcgtagtcacgtccgccgagaagcgcaagcacgcgccctgttgccggatcaatcgcggaaaagccgacctgaatgtcagagccggtacggatcgtatgtgccacagtgttttccgcgatccgctgcatgcgcttatcaagcgttgtataaacacgcaatccgctcgttgcgagctgttcgcgcgtcatgccgagctttttctcgagttctttcatcgcatcatcgtaaaaataaggcgccgttttcgccgcggttctgcttttcagcggctgataggcaagcggcgttttcttaatcctttccgccttttcttttgagatcattttttgtccggccatcagacggagaatggtttcctggcgctgtttggccttcttttcactgacatatggcgaatagccggacgggcctttcggtatgcccgccagaagcacggcttccgcatcgttcagatctttggcgtgtttgccgaaatacaggcgggaggcggcttcaattccgtatgcgccgtggccgtaatatatcgtatttacataaccttctaaaatctcgtttttggaatagttctgttcaaggcggatcgtgtaaaatgcttcgttccattttcgtttccatgttttatcatgctcaaggtagagatttctcgcgtattgctgggtgatggtgctggcgccctgaaccttggccattgcctttatgtcagccagcgcggcggcggccatccgccggtaatcaaaaccgtggtgattgtaaaagttttgatcctccaccgcaatcgcggcctgcaccgctgtcggattgatatcttttaaccgaacccagtagcgcttttccccgaaatcggtctcacctagctttgagccgtcatttgcataaagaatcgtagactgaggaacccggacggagggggcgccctgccatttcgctgcaagaagaacggatgtgaagcagacgccggccagcattccgccgatcagtgtcagaaagatgcaggcgcggatgattttgaacgtgattctgagctgttttccagatactttatccacttttgggaaccccctttttcatgattctattattatgtgaaaaaagggggttttttaaacatatcaaaccggacacttctttactttttcccctccatcctctatactttttccttaggtgaaaatgagattttaaccggaataaaagcgatacagacgcttacaataaatgaaataagccttgaaagggagatgacaattgagcgagctttggtatacggagaagcagacgaagaatttcggcattacattaaaggtgaaacaaacattacatacggaacagacggaatttcagcatctggaaatggtggagacagaagaattcggcaacatgctgttcttagacggaatggtcatgacatctgaaaaagacgaattcgtctatcatgaaatggttgcgcacgtcccgttatttacgcacccgaatccggaaaacgttctcgttgtcggcggcggagacggcggtgtcatcagagagattctgaagcacccaagcgtaaaaaaagcgacgcttgtcgacattgacggcaaggttattgaatactctaaaaaattccttccgtccattgcgggcaagcttgatgatccgcgcgtcgacgtgagagtcgatgacggtttcatgcacatcgcgaaatcagaaaatgagtatgacgtcatcatggttgattcaacagaaccggtcggaccggccgtcaatctgttctcaaaaggcttctatgccggaatttccaaggcgttaaaagaagacggcatcttcgtcgcgcagacggacaacccgtggtttacaccggaactgattacaaacgtacagcgtgacgtgaaagaaatcttcccgatcacccgtctgtatacggctaatatcccgacgtacccgagcggcctgtggacatttacgatcggttctaaaaagtacgatccgcttgaagtagaggacagccgtttcttcgacatcgacacgaagtattacacgaaagagcttcacaaagcggcatttgttcttccgaaatttgtgagcgacttaatcaaataaaaacgtacggcgcaggagcgaatcttgcgcttttttacaggaaagcgagggaattattgatgagatttgatgaagcatattcaggaaaagtatttatcgcgagccgccccgactggaaagaggcggacgccatcctttacggcatgccgatggattggacggtcagctaccgtcccggttcacgattcggcccggggagaatccgcgaggtgtctatcggtcttgaagaatacagcccgtacctcgaccgtgacttggctgatttgaatttctttgacgccggagacattccgcttccgttcggcaatccgcaaagaagccttgatatgattgaagaatacgtggacggcatcctagaaaaaggcaagttcccgctcggcatgggaggggagcaccttgtatcatggcctgtcataaaagccatgtataagaagtttccggatcttgccatcattcattttgacgcgcacaccgacctgcgcacggattatgaaggcgaaccgctttcccactctactccgatccgcaaagcggccgagctcatcgggccgcaaaacgtattttcattcggcatccgctccggaatgaaggaagaatttgaatgggcgaaagaaaacggcatgcacatttctaagtttgaagtgcttgagccgctgaaaaaagtgctgccgcagcttgcgggacgcccggtttatgtcacgatcgatatcgacgttcttgaccccgctcatgcgccgggaacgggcacggttgacgcgggaggcatcacgtctaaagaattgctcgcgtccatccatgaaatcgcgcgctcagaggtcagcgtaaaaggcgccgacctcgtagaagtggcaccggtctatgaccactcagaacaaaccgcaaacacggcaagcaagatgatccgtgaaatgctgcttgggtttgtgaaatagaaagaatttcccccgcttgaaacatggcgggggatttttatattgtatataaactacttagaagttagtaaaagaaatatattattttactattaataattgatgttattgataaaaattatataatagggtattatttagtaaatacatctttagaaaggaagttagaatgaaaacagcagtagaaaatgaattggaattaaaaaagattgaaatttcagtaattaaactgataattgctgaaaagcctaataaagagatcgctaagtcattaaactactcgcagcgtaatgtcgaatatatcatagccggtctttgtaaaaagtggaatgtaagtactagagtcggtattgtttcggaagcatataaaaggaattgtatacagtgaacgaaatgaaagaaaaacccctattgagggggtttatttatatatgctaaaaaaacattctatacaggaatgccgtaaaaataaaaactgagattgtcaggtagttcaaatttgttctccatttcagaagaataaacaaaagaaataagtatgcaatattgaacaaatcaaagatagaaaaaatcaaatgattacttgtgaaaaataaactagtgtttggatgttgtgcgaaaatatttttgaatgatataagaaaaaacttaatcgcgaccgggatgttagaaaacataaatagggaataaaaagttttgatcttaatctgagcgccaagaaaatttataatgagaaataatacgaatccttcaaaaatgaccccgaacattaaaagaaacagtgcggctattgcaatgatgtaatctaaatgttttacttgctcaacaacttgtatagggatgtttttgggaattaaacttttcataaaaggtaaaagggaacttaaataaaaagctaacccgataatataaaacaaaaacgaggacaaaaaattaatgtttcgttccttaaatgaagataattcaatttgcataatcctaagaggctccttttataaagataggtgtaataaatgtttctaacatagctgctatcattaaaccgagaaatataataccaatatatttaaaagtgaatttcaaatttattttgaggagtaataaatctaaagttaatttcattcctacagaggctgcaagaagcaataccggcacttcaattattccatggggtataacaagcagtaaaaggtttaaattgtctttaatgtttcctatcgcatttcctaaaattaatccattaataattaaaacagcaaccgtgccaagcgacagcgttaacgggcctaaaaaaacaagcagactcgctactttaatattattaaagaaaatctgaaaaaaatccggacggatatttcgatttagattatttacatttgaagcggaatctgtataaatatatgctgtaaataaagcaattaaaaataagatcagacagagtatgtacaatttgactaaaacattctttttaaacaatgtattttcatccattcgttaaagggactgccagggatattgaatttaatgttttatattatgctgctgctgtacttgctgcagccaattgttctaaaacggccaatggcaagcctgcaccaagagatcctaaaacagtaatgatagccagaactgatcccgttgcggtgatagcactgacaatccaactaggagcgataattccagctctgtttaaaatatcgataacatccatgcttaaatgattatgtttcatactgaaaagagcgagaacaatgattcctgatgctactaatgtaaaaatcgctttactattttgtgtttttaaaagtagattcattttttcctccaattttttcaatatccccagcaagttaaataataaaatatattggaatctatttgaattgcggatttccgaaaaaataatagttaagaggtgaaatccgtaaaagtatctgctggcttatttcgtacaaagaaagccggaccatatgtatgatccggctttctttggtactgaaacattatacttttttttcaaaaataatatcaaaataatcagctgccccatagcctgaaatagcaggagcaaatatttgaaccagctttcacccttgctgcgaatacttttcaataatttatttatagtcttctttaggctttcctttccatcggtttacttctgcttttatgaacttgtattcgtacattgctgtataatcctccggaagtgtattggaatcgttaccttgtttttcgattttgataaacttgaatccataaatagagcgcgcagcctattaaaagaatcggaaattgccatcctgtatttccgtttttaaaataatctattaatgaccatatcagtaaagcgacagtataaaaactaaatgctattctggcggctgtacccgattggtgtttttgcatctcatccattttcttcataagaaccgctcccttaattttttttggcgttatagttgaatactttatctattcccgtatttaaagcgtgagctatcgaaaaagccagacttaaagtcgggtcatatttattattttcaattgcattgatggtttgcctggtcacattgcagagcttagccagatcattttgtgaaatatcagctgctgttctaagtttttttatattgttatccactaaaaccctccttaacttattttgttttttattttaaattttcaaatttatatatatttattttaaataatatatgtataagtgtcaaatactttttacacatttgagttctaaggtatgttttttgtttttgtaaattagttgtttatataaaaaacggcttgcagtttaacctgcaagcctaaaagtaattatcatttaaatcatagctctttgtgctacttcgaattggtgtgaaggtgtattcgtcatatctgctgttataaaaactgaggttacagctaagcaagtgagtaagaccttatacttcagcttcataaaaagttaccccccttgaatatgctgtcttgcttcttcaacttttaaaaagtatgttgaagcttttttataatcttcaagtttgtgataatatttagctgcatcaagagcaaaatcttctatatctgcatacatcatcttactttccaaaaagtcaaaactccttttcattgcatcctcatcaggtccgttcacatacaaagattttaaaaattcgaattcatgtaaataaactgaatctgctgactcttcggaatagataactccttttttatgatactcgagcgctttgtcgtatctttctaatttataatgaatctgtgtcattaaaaaatatgcttggggcaaagaaggggtcattttagcactttcaaaaacatcaatggctttttcaacataagttatagctgcttcatagtcgttcaggctttgtttgcaaagtgcgatgttatacagcgtcctgcccattaattgaggctgtttttctgtttctgccaaagaaaaagccttttgaaagtgagtaattgcccgatcatatagttttaaatccaggaaatttgctccgaataaggattggcattgtatgagcctgatatcgtatgacgactgagctttatatatttcatatgcctgccttgcgtaatcggtagatacatacgtttgtttcaaatagtagtagacttcagacatcttgaaaaagtactcggctttatcaatagtatccttaataaatgagagtttcgtctcagcctttttaaaaaattttatagccgacaaatattcccgctgatccagctcatacatcccccggaaaaaattaaaataataatcaagccgtccggtcagccgggcctgctttttatcaatatccgcgagcagatccgatagtctcggctgttcttctatccgctgcgattccagcggttcgaggtattcgagcatcagattgtggcggaattccatgagagaatagtacagatgaagatcctgatcttcttccaggcctgcaagctcttctttgatttctctccgcaagtactcggcgtccgggatgctgaaccttcgaatgtacatataccattcgttgattttttctccaaccgctgaagacgataaaacactcgccactattccgaatccctcccttccacgttatgtatatgacatattttatcattttcattcggaaggatagcgcaaaaataccgcaaacttttcccctttgacaaagccgtccgccgaaggaaccgcatttatcccgcagcctaggatttccggttttttcattttccttaaaaatcatgtttatcttcaaaaccaatcagcaaagatggtaagataggaggaagcggttgaactttttcccttgaaaacttatactattcaggttaagcgggatgatgaaaaggaagtgtcagcatgagacaggagacaccagtagccattcatgtgcaatcattcattcataacggctccgaagaagagtcggttgaatttacatcgagtggattctattacgtgagaaacggcaaaacgtatctttcctatcacgaagagcatgatttgggcaagattaaaacggtcgtcaagattacagaaaaagagattctcgtaatgagatcgggcgccatccaaatgaaacagcggttcattccgggggcatcgacactcactcaatataaactgccgttcggacaaatggagctccgtacggaaacgaaaaacattcaatctgatgtcggcggttcggaaggctccgtcaaactgacatataacatgactgtaggcgaaaaccaagaacatgtacataacatgacgatccaatataaggaggaaacaaaggcatgaatattgcggaacaaatgaaggacgtgctgaaggaagagatcaaagcggccgttctgaaagcgggcctggcggaagaaagccagattccaagcgtactgttagaaacgccgaaagacaaaacacacggtgattattccacaaacatggcgatgcagctggcgagaatcgcaaaaaaagcgccgcgccaaatcgctgaggagatcgtggcgtcatttgataaaggcaaagcttccattgaaaagatggatattgcggggcccggctttatcaacttttacatgaacaacagctacttaacaaaactgattccgtccgtgcttgaagcgggtgaacattacggagagacaaacatcggacaaggcgaaaagattcaggtcgaattcgtatcggccaacccgacgggagatcttcacttaggccatgcgcgcggcgcggcggtaggtgacgcgctgtgcagcgtgctttctaaagcgggctatgatgtgagccgtgaatactatattaatgatgcgggcaaccagattaacaacctggcgctttccgttgaagtccgttattttgaagcgctcggcctcgagaaaccgatgccggaagacggttaccgcggcgaggatattatagcaatcgggaaaaagcttgccgaagatttcggcgaccgtttcgtacatgaagaggagagcgaacgtcaggcgtttttccgtgaatacggcttaaagtacgagcttgataaacttcgctccgacctggaaaacttccgcgtgccgtttgacgtatggtattctgaaacgtcactgtacgaaaacggaaaaattgatcaggcgctcgaggcgcttcgcgaaaagggccatgtatacgaagaggacggcgcgacatggttccgctccacaacgttcggcgacgataaagaccgtgtgctgatcaaaaaagacggctcatacacttatctgctgccggatatcgcataccataaagacaaacttgaccgcggattcgacaagctcatcaatgtatggggcgcggatcaccacgggtatattccgcgtatgaaagcggcgattgaagcgctcggttacaagaaaggcacattggaagttgagatcattcagctcgttcatttatacaaaaacggcgaaaaaatgaagatgagcaaacgtacggggaaagccgtaacgatgcgcgacctgattgaagaagtcggcttggatgccgtgcgttatttcttcgcgatgcgcagcgctgatacgcatatggattttgacttggatcttgccgtatccacatctaatgaaaaccctgtgtattatgcgcaatacgcacatgcacgtatttgcagcatgcttcgccaaggggaggagcagggacttaaaccggcggcagatcttgatttcagccatattcaatcagaaaaagaatatgacctgctgaaaacaatcggcggcttccctgaagcagtggcagaagcggcagaaaaacgcattcctcaccgtgtcacaaactatatttatgatctggcttccgctctgcacagcttctacaatgcggagaaagtcatcgatccggaaaataaagagaagagccgcgcgcgtctcgctttaatgaaggcgacgcaaattacgctgaacaatgcgcttcagctgatcggcgtatccgctccggaaaaaatgtaatgatgatcaaaggacaaagtcttcgggctttgttcttttttttgcatataaagcgtgtgatgtaattcacaatccagcacactgagtttttgtatgataagactgatattgaatcagtgaaaggggcaagccgaatgatcaatcgtcaacatattcaattatcgctgcagtctttaagcttagtggcagggtttatggtgtgggtgctgatttcatcgctcatttctcaaatgacatcagatattcatttaagcaaaggcgagatttcattggtgacggcgattcccgttattctcggatcgcttctccgtattcctttaggatatttaacgaacaggtatggcgcgcggctgatgtttatgatcagcttcatcctgcttttgtttcccgtattttggatcagtatcgcggattctttatttgatttaatcacgggcggctttttcttagggatcggcggagcggtattctccatcggagtgacgtccctcccgaaatattatccgaaagaaaagcacggtgtcgtcaatgggatttacggtgccggaaacatcgggaccgccgttactacctttgcggcgccggttatcgctcaagccgcgggatggaaagcaaccgtgcagatgtatcttgttttgctggctgttttcgcattactgcacgttttgttcggcgaccggcatgagaagaaagtcaaagtttccataaagacacaaatgaaagccgtttaccgaaatcatgtgctgtggatgttgagcctgttttattttattacgttcggcgcctttgtcgcctttaccatctatcttccgaattttttggttgagcattttgggctgagccctgcggacgccggtctgcggacggccggctttattgcggtctctacgctgctcaggcctgtgggagggtttcttgcagataaactgagcccgctccgcattctgatgttcgttttcgcagggcttacgctgtcaggcgtcatgctgtcattctccccggcgatcggcctttatgcgttcggatcgctgacggtggcagtctgctcagggattggaaacgggacggtatttaaactggtgcctttctatttttcgaagcaagctgggattgccaacggtattgtgtctgccatgggcggactgggcggttttttccctccgctgattctggcaagtgtatttcaggcaacgggtcaatacgcgatcgggtttatggcgctttcagaggttgcgttagccagctttgtccttgtgatctggatgtattggcaggaaagaatgaaaacacatacggagagaaacagtcatagccttgattcataatgatccattcacaagattgttagttttttctgggtgagtgcaaatcaagtcacgttacaatatacatacgcaacgtgactttcttcgaggtgagctcatgaatattctctctgtccgaaaatctgataaagaacttctttcccgcgaactgcatgaattgctggaatcgatcagtacgaaaaggaaaatgaaaaaacacacgtatttgtttcaagaaggaatggatgcagaagagctttatctgattcaatcaggactcattgaaatcggcaagctgacatctgacggaaaagacctgacacttagaatctgccaaaaacacgatattgtcggagaattgacgctattcacagatgagccgagatatatgctcagtgcgaaagtgttagaggacggggaggtgctcgtcattaataaaaacaggctggaaaaggaattggtccaaaacggtgttttgacgtttgaatttatgaaatggatgagcacccatctgcgaaaaatccagtctaagatcagggatctgcttcttcacggcaaaaaaggggcgctctattccacccttatccgcttatcaaacagctacggggtggaacgaagcgacgggattctgattaacattgtgctgacaaatcaggatttggctaagttttgcgcggcggcaagggagagcgtcaaccgcatgctgggagacctccgcaaacaaggggttatttcgatagacgaaaccggaaaaattattttgcacaagcgggactatttacgatgcgagatcgagtgtgaaaattgtccgcttgagatctgcaatattgactgaaaaaacaagggcagccggtgtccttgtttttcagcttgtgatacatatacacatgacggcgaaaaagaagccggcatttacgatttccagaatgccgatcgttttcaccggccagtctcttccgtgaaaaaaccaggcccgcagactgcttgggataaaagcgagaaacgcccagcctgccccgagaagagccgataaaaaggggagcaagaggtgatatccccacgaccagtaagcaaaccttctgttttttctctcccgtatgaccgatttcacataaaaagaactcccgacaaaaaataaagcggattgcaagaatagaaaccaagcccagccgtcaaggattcccgttcccagccagcagctcgcaagcccgcctgaacaaaagaacaagactcccgcaatatcattcgtgagcgcccgttcgttttttcggcgggcataatgcgtatgtatgagaaacagcggcaataaaaaaacgccgatccagacgagctgcggcttatgaaagacagaaatgatcaaaaagcagcaggccggaaaaccgtaataccatatccacttttgataaggctgaagctgtttctttttcaaagcgagcgaaacgggataaaccgtcaagtaaaggaacagccagcccagaaagagcggaatatgccagaaaaccgggcctcccttgaccatgccgagtaaaaatggaatcagcagcatcgcccatgcgccgtgctgcttcggaatcatcgctttcatcgaaaccctcctttttatttcattataagtgcaaacactctcctgataagtgactttcatcatacaagctgtgaaatacatcactgccgcgcgggctcaatcgggctacactaaagctatcaatagcacaggaggctttcctatgaatcagtgtgactatttattatttctgaaacaacttcctatgtttaatgaagtgcctctgtccattgtcgaaaccttgctgaaaaacgggacgtttatccgcggctcatctgaccaatctccatcctttcttcattcacaatccgtttatattgtattaaaaggcaatatccgttttacggacagcaggctccctgaagggtcgcaaaccgttgcgctgtgggaaaaaggcgatgtgtttccgattgatgaaaaaggcgggctctctttatcgccttttatctcagtcaatgcctcaccggatattctggtactccatattccatattctatatttaagcaaatgatgtcttaccatccgcggctgcaaatgaactttttggcgatgcttcagcaaaatgtcttctgttcctatcagttgtttttgcggtatctgcatacatcactggatgaaaacgccgaacccggttcttaaacagaaccggtttttttgatgacgcgggcgtcctcatatcgtttaaaaatccttcctgctgctctgtgtgaacgttttgtgaaaaaagcagagtgtgtgacttagttcacaaggtgatgcgccgtctctgtttatagtgtacatagcatcacctgactcggaaggagtgaacgatcatgaagaaaaagaaaatgagtccgttgctcaggagattaaactatttttctcctatcgaacatcattcaaataaacatagccaaacgacaagcgaagatcgtgattgggagaatgtatacagaaacagatggcagtacgacaaagtcgttcgctccacccacggcgtcaactgcacgggttcttgcagctggaatatttatgtgaaaaacggaattgtcacgtgggaaggacaaaacttgaattatccatcaacaggaccggatatgcctgatttcgaaccgagaggctgtccgcgggggccagtttttcatggtacatctacagcccgctccgtgtgaaatatccatatgtgcgaggtgtgctgatcaatttgtggcgggaagcattgcagacgcatcaaaatccgctggatgcctggaaatcgatcgttgaaaaccctgaaaaagcgaagtcctataaacaggcaagagggaaaggcggctttgtccgcgcggaatggccggaagtgctgaagctgatttcagcctctctgctgtatacagtgatgaaatacgggcctgaccggaatgtcggtttttctccgatcccggcgatgtccatgatcagccacgcgtcaggttcgcgattcatgtctttaatcggcggcccaatgctcagtttttatgactggtatgcggatctcccgccggcgtccccgcaaatttggggtgaccagacggacgttccggaaagcagtgattggtacaattcaggctacatcatcacatggggttccaacgttccgttaacgagaacgcctgacgcgcactttttggcggaggcccgctataaaggggccaaggtgatttcaatcagtcccgattttgcggaatcctcaaagtttgcggatgactggctcagtatccgccaagggactgacggagccctggcgatggcgatgggtcacgtcattctgcaggaattttacgtgaatcaagagacggaacgtttcatggaatacgcgaagcaatacacggattttccattcctcgtcaccttatcaaaagaaaatggcgtatacacagcgggacggtttctgcatgcgaaggatatcggacggcagacaaagcatgatcaatggaagccggcggtctggaatgaacagacaggtgcgtttgccataccgcaaggaacaatgggctcccgctgggacgggcagcagaaatggaatctgcacatgatcgatgaagacaccggggaacagatcgagccccgtctctccgtgctcggaatagaggacgaaatcagtacggtgcgcattccgtatttttcaaatgacggaaacaaagtgcttgagcggaatcttcctattaaaaaactggaactgaacggtgaagaggtgtgtgtcacgactgtatttgacttgatattggccaactacggcgtgaaccggggcatcggcggacaatcagccgcatcttatgatgatccccgtccgttcacacctgcctggcaggaacagatcacgggaattaaaagagaagccgttatacagattgccagggagtttgcccaaaatgcgattgatacagacggcagatcgatgattatcgtagggcgggaatcaaccactggttcaactccgacacgatttaccgcgcggtgttaaatcttgttttattggtaggcgcccaaggcgtaaacggcggaggctgggctcattatgtcggtcaggaaaagctccgtcctgctgaagggtggcagacgatcgcaaccgcaaaggactgggaaggcgtgcctaaactgcaaaacggcacctcatttttctactttgcgacagaccagtggcgttacgaagaccagccgatcagtgacttggcttcaccgatcgcttcttcatcccgctacaagcatcacgccgattacaatgtgctggcggcgcgattagggtggctgccgtcctacccgacattcaatcaaaacggcattgatctgtacaaagaagctgagaaggcgggggcggcgacacctgaagacgtaggtgcgtacgtggcctcacagcttcaggagaaaaaactgaaattcgcgattgaagacccggacaatgaagtgaatttcccaaggaatctctttgtatggcgggcaaatctgatctcaagctcaggaaaagggcatgaatattttcttaagcatctgctggggacgacgaacggtttgatgaatgacgacagcgacagcatccgccctgaagaaatcaaatggcgggagcaggcgccggaaggcaagctcgacttgttaatcaatctcgactttcgaatggccggtacggcgctgtattccgatatcgtgctgccggcagcgacatggtatgaaaaacacgatctcagcagcacggatatgcacccgttcattcatccattcgctccggcgatctcggcgccgtgggaatcgaggtcagactgggatattttcaaagcactgtcaaaagccgtttccgacctggcggaagaagtcgatatggagctggtgaaagaggtagtcgcgacgccgctcctccacgacacgatgcaggaattggcccagccgttcggaaaaatcaatgactggagcaagggcgaatgtgaagccattccgggaaaaacgatgccgaatatccaagtcgctgaacgggattacaaacacatttttcataaaatgaccgcgctcggccctcatacggctttaaaaccgagcggaacaaaagggatgagctggtcgattgcggatgaatatgaatcactcaaaaagagactgggagaaaccgattcagacggcgttgccaaaggatgcccgaatataagtgaagcaaagcaggcggcagaagcgattttaaccctgtcgtccacctcaaatggaaaggtcgccgtaaaagcatgggaatcgcttgaaaacatcacaaacctgaagctgaaagacctggcggaagaacgcgaggaagaatgctttacgttcgagcaaattacagcccagccgaaaacggtcatcacgtctccggcctttaccggctcagaaaaaggagggcgcaggtactcgccgtttacgacgaatgtggaaaaattaatcccgtggaggacactgaccggcagacaatcctattatgtcgatcatgaactgatgatggaattcggtgaaacgatggcgacatttaaaccgatcctccagcaccgtccgttcctgagcaagcggcctgatcaagagggcaaagagatcgttcttaattatttgacgccgcataataaatggtccgtccacagcatgtattttgattccctgccgatgctgacgctgttccggggcgggccgaccgtgtggatgaataaagatgacgcaaaggacacggatatcaaagacaacgattggattgaatgcttcaaccgaaacggcgttgtcgtggcgagagcggttttgtctcaccggattcctaaaggaatggcgtttatgcaccatgcccaggaccgccacatcaacgtgcccggcacaaaactgacgaataaccgcggaggcacccataacagcccgacaaggattcacgtcaagccgacccagatgatcgggggctacgcacagctcagctacggctttaactattacggtccgacggggaatcagcgcgatctgaatgtcgtcatccgcaagctgaaggaggtcgattggcttgaagattaaagcgcagatcggaatggtcatgaacttggataaatgcatcggctgccacacgtgcagcgtcacctgtaaaaacacgtggacaaaccgttccggtgcggaatatatgtacttcaataatgttgaaacaaagcccggtatcggctacccgaagcaatgggaggaccaggacaaatataaaggcggctggacgttgaaaaaaggaaagcttgaactgaaatcaggcccgaaaacaaaccggcttgcaggccttttctataacccgaaccagccgacgattgatgattactatgaaccttggaactatgattatgaaacattaacaaacagcccgcagaaaaagcaccagccggtggcgcggccgaaatcgtccttgacgggcgattttatgaatatcgaatggggcccgaactgggaggatgatctcgctggcggccacattacgggtcttgaagatccaaacgtgcaaaagatggaggaatcgatcaaaacagaattcgatgaagtctttatgatgtatctgccgcgtatttgtgagcactgcatcaatccggcgtgcgtgtcctcctgcccgtccggcgccatgtacaaacgcgaggaagacggcatcgttctcgttgatcaaaacgcatgccgttcatggagatattgcgtctcatcctgtccttataaaaaagtctattttaactggcaaacgaacaaagcggaaaaatgcacactctgctttccgcgcttggaggcggggctgccgaccatctgctccgaaacgtgtgtaggcagaatccgctatctcggcgtcatgctgtacgacgcggacaaagtggaggaagcggcctccattgaaaatgaaaaggatctctaccattcccaattagacgtttttcttgatccgaatgatcctgaagttgccaaactggcaaaagaacaaggcatcccggctgaatggatagaggccgcgcagcaatcgccgatctacaaaatgatcatcgattggaagattgcgctgccgcttcatcctgagtaccgcacactgccgatggtttggtacattccgccgctgagcccgattatgaatctctttgaaggaaaaggcagccggcaaacggcggaagatatttttccggctatcgaccaaatgagaattccgattgactatttggcccagttattaacagccggtgatacggatcatattcggtcaacgttaaagaaaatgtctgtcatgcgccagtatatgagagcagtccagacgaataaatccatcgacccggcactgatctccagtgtcggcttaacagaaaagcaaattgaagacatgtatcggctgctggcgatcgccaaatatgatgaccgctttgtgatcccgagcagccatcgagaagaagtgtctgatttatacgctgaacaaggaagctgcggcttgtcattttcaggcggccccggctcttgtttctaacttttgataaatgaggtggaacaagatgaacaccacagaccggcaaatgacattctccgctctttccattcttctctcttatccggatgaagagtggagagccgggcttcccgattggaaggctcttatccatgaaatcggcattcagcaaatccgtgagaaactgctgcactttttagaggcggcagccggcttttctccgcaagcgctgattgaacactatgtgtatacgttcgacttcgggaaaaaaacgaatatgtacgtcacctactttaactcaggcgagcaaagggagcgcggaattgaactgctgcatttaaaaaacacctaccagcaatccggtttcctgccgacagagaaagaattgcctgattatctgccgctgatgctggaattcgccgcggttgcggagattgaagcggcgagaagcgtgtttgagaaatacctgtccaatgtgagggagctggcttcccgcctcgaaaaaaatgacagcctctatgctgagctgctgcacgtgctgcaggccgcgctggaaagcatcggtgtacgtgaaagcactgaagaaggggctgctcaggcatgagcgggcagatcctgtgggggattatgccgtacatggtattgacgatctttatcggcgggcatatttaccgctatcagcatgaccagtttggctggacggcgaaatcaagcgagctgttagaaaagaaaaaacttgcggcgggcagcacactttttcactggggactgctgttcgttgtcggcggacatgtcatgggaattctgatcccggaaggcgtgtatactgtactgggcatttcagagcatacgtatcacaaaatggcgatcggcgcaggcctgccggctgggatcgcggcttgtgccggactagtgatcctgacatacagaaggctgtttgacaaaagaatccgcaaaaccagctcgccatcggatatcctgacgcttattctgctgctgttcatgatgctgtcgggcgttgcggccacgtttctcaacattgactcgaaaggatttgattacagggcaacagtcgggccgtggttcagggaaattgttttgttccggcctgacgcttctttgatggagagtgtcccgctatggtttaagtttcatatcatcatagggtacgtcgtttttatcctttggccgtttacaagattggttcacgtgttcagcctgcccctcaagtatttgacccgcagctatgttgtctatcggaaacgcacgtaaaaatccccctgcaagagggggatttttttatggtgaaaaaataaaaacataagatattttctgccaaggtaatggctgggcggcggggattcctgttatgttttatgtggaaataatatcaacaaaaggagagtgaagaatgaagcggattttcctcattttagccgcctgtctgatgacaagcgccggcgtcctgacactcagacattctcatgtattaaccggcggcacagcgggactgtcactaagcctgtcgtacttgtttcattcctcatttgcgattatcttctttctgatcaatatcccgttttatatattttctctcatcagaatgggaatcaaattcactctatccaccgtttttgcagtcactgtgctgactctgtttaccggcgcggatcactggctgccgccggtctctgtttcaccgcttgccggggcgatttgcggcggggcgctgatcgggttcggcctgtcgctcatgttttatcatcaggcatcgctcggcggcgccaatatcctcgctttatttctgcaaaagcgctgcggatggaatccgggtgccgttaatttcctcttcgattttggcgtcgtgctggccggcattttttccgtcggattgctgaaagggctcttctccttagtgtcgatagcggtcaccggtctgatcatcggcatcttcaaaaataaaatcaaaggcagctgctcgctcaatccggcattgcttcagaacatcacaaccggccagtcacaggaagtgtcatcataatcctttccgctcgtgcggagaggatttttcatatgtttacaggccggaaaacagagggtatacagagatatcggatcagatgggagagagtcgggatgctgaaaaggagactggaattttgctttttatatatgatgcttatcggagcatatgtcatatggttttttccggtttccaggcttgagttttacggagggttgctttgctatgcaagcattattttgttcagcatctattcgttaattcttgaaaaccgcacctctcagcacacgctgttatggattcatattcttgtgttttttccgatcgccgggtacttattttaccttttttccggccagctttatgaaaaaggcaagctgttcaggtcgaaacggacatacaaccgggaaaagctgagaacgatatttgatatggaacagacgcccgatctgtccgggctgaaaggaaatcagaagcgtttctttcaatattcaatcaaggcgtctcatatgaatatcaatacaaaaagcaggctgaaggtgctcaaaaacggggatgaaacatttccggagctgtttgaagcgctccggtcggcagcatcatttatacatattgagtattacatgttcaaatcagacatgcttgggcacaagatgatggacattatgatggaaaaagcgcgtcaaggcgtggaagtgcggtttttgttcgacgcggccggcagcctgaagctggccggaaaagacattaaaaaactgaaacgcgcgggcgtgaacatcgtcccgtttctgccgctgaaatacggttttttcaaccaaaagttcaatttcagaaatcaccgcaagatcgtcatcgttgacgggaaaaccggttttgtcggcgggctgaatgtcggcaaggagtatatcggcaaagaccaaagtgtcggtttttggcgggacacccatatgaaagtcgaaggagaaatcgttcagacgctccacagcatttttatgcttgattgggaatacgtttcggatgaggtgctgattgatcagaaagcatacagccgcccggtccctgcagaaagcggcggcgtctatcaagtcgttccgacgggccccgatatgaaggagcggatgagcgatctgtattatgccatgatagcggcggccgaatcatctgtatggatcgcgacgccttatttcgtgccgaatgagccgatccgcacagcgctaaaggaggctgctgccagaggcgtccgggtgcgagtcatggtgccggaaaccaatgacggatttttaacccagtacgcgacgagatcgtatttccccgagcttcttcgcgaaggaatcgaagtctattcctatcaaaaaggctttatgcatcaaaaggtgctcatcactgacggaaacctcgcctctgtcgggacggcgaacatggacatgagaagctttcagctgaactttgaggtcaatgtcttttttacagatcaaaaggcgatcaaagatcttgaagcgcattatctggaggatatgagagagtctgagaaaatcagccccgtccgtttctataagcgcacattatgggaaagaacgaaggaatccttcgcgcggttattttccggcgttttataaaaaacgcttttaaaactccttgtgtatagtataattgagaaatattatcattaggaacgaggcacaaggaggacggaaacgtgctgcgacaatttttttcttattataaaccgtacaagaagctgttttttctcgacttcttttctgccatcgccggcggattgatggagctgagttttcctctgattgttaattactttatcgatacattgctcccgggcgggattggcgtctgattattttgacttccgctgctttattcggagtctacgccctcagctcggcgcttcagtatgttgtgacgtattggggccatatgctcggcattaacattgaaaccgatatgcgtaaaaagctttttgaccatctgcaaaagctttcgttcaaattttacgataacaacaaaacgggcagtttaatgtccaagctcaccaatgatttgatgtatatcggagaaaccgcccaccacgggcctgaagacctgtttatcgcggtcatgacgattttgggcgcgttcggtgtgatgctgttcattaactggcagctcgcgctgttgacctttatcattatgccggtcgtcatttggcttgctttgtatttcaataaaaaaatgacctctgcgtttacaaaactgaacaaagacgtcggagacttcagcgcgagggtcgaaaacaatatcggcggcatccgtcttgttcaggctttcagcaatgaagcgtttgaaacgcagcggtttgacgtgaacaatcagcgtttccgcaaaacaaagctgacgtcatataaaatcatggcgaaaaacggctcgatcagttacatgctgacaagattcgtcacgctgttcgtcctgttgtgcgggacatggttcgtgatccgcggatcgttatcttacggggaattcgtcgcttttgtgctgctgacgaacgttctgttccgtccgattgataaaatcaacgcaattattgagctgtatccgagaggcatagccggttttaaaagctttatagaaataatggaaacggagcctgatatcaaggacgccccgaacgcgagacatgtgtccggtttaaaagggaatatccgttatgatggtgtgtcattcggttacgaagaaaacagcccggttctgtcgggaatcaatttgtccattcatgcaggggagacagtcgcattcgttgggccttcgggagccggaaaatcaacgctgacaagtctgctgccgcgtttttatgatccgtctgaaggcgtgatttccatcgatggaattgatattaaggacatgacgctgtcatcattgcgcggacaaatcggcgtcgtccagcaggatgtctttctgttttccggcacattgcgggaaaacattgcgtacgggcggctcgatgcgtctgaggaagaaatccggcaggccgtccgccaggcgcatttagaggagctggtaaacgggtatcccgacggtttaaacacggtgatcggcgagcgcggcgtgaagctgtcaggcgggcagaagcagcggctttccatcgccagaatgtttttgaaaaacccgtcgatcttaattttagacgaggctacatcagccctcgatacagaaacggaagccgccattcaaaaatcgctgcaagagctgtctgaaggacgcacgacgcttgtgatcgcccatcggctggctacgattaaggatgcggacaggatcgtcgtcgtcacgaaagaaggcatcgctgaacaaggtcatcataaggaactgctggcatccggcggcatataccagagactccatcaggcccaattcggcgagctgatacatgaataatggaaaaaggatagacgagcgggggccgggcagcctcctgtctatccttttttttatgtagtccgtatttaatgggcttctttttgcgcaggttcgatgatatgtttgaaacggtcaacaagctgcaccgctttctttccttccactacaattaaatattcttgttctttatgagccattctgaacgtttccagctcaatgatatctttgattttgcacattgtttttttagagtagatatacagctcgtggcctcccgtgtggcaaagctgataaagctgaagcatgtttcttaaagtgaacttcttagcggctattttcaaagatgtaatgtttttcatgtgttttctcctccgtctgatggtctgttatttcggaaattccccatatgaacgggtgataaacctggttatgccttccacctcagcactccgcccgccaggcgtttaactccgcggatggcgcttaattcttcgacgagccggagcagcgcccggtctttctctttcgcctcaatcataaaatcgatgcccgcatcccattgtctgaaccgctccagcaccggcagaataaaattcgcgtccacatagtccgcatgactgcgtacggctgattctgattttggcgaggagagatggaccttcggctttaagccgatccgctgccatgttttgatcatccgcggaagaatgtcatctaaatcagcgtcatcggccggattggcgtaaaaatggtgataatcaaacacaaacggaatgccttcttgctcacatacactgagtgtttcctcggacgtatatgttttatcatcgttttctaaagtcatccgctgtttgatgacttcgggaagttctttcagattcacgcggaaacggccaagcgcgctttgtttgtcaccgtaagcgcctccgacatggatgttgatgacggaacggtccgcgatgcccattgcgtccagcatgtcataatgataggccatatccttgaccgcatttgcggtaatctcccgtttcgggcttgtaaaaagcgtgaattggttcggatgaaagctcgttctgaggtcatattttctgaccagcccgccgatctcacgaaactcctggcgaaacggcgtgacaaaatcccacagtacatccgggtgcgtggcgagcggcacaattgagcttgagaacctgtacaaagggatgccgtggccgaccacatagtggagggtgcgcagcgtattggtaagatttgctttcgtcacagaaagcagagcgtctttccgctcactgcgggaaagcttggtatagcgcgcatatgttaaggttttggcgggggacgcgtcccaaaggcacatggcgtttgcgacgaatccgaatctgaacagcatatggtttctcctttataaaaagtaagatatggcctttcccagccattctgcaggaagctgtctgacggagcgctgtttcactttttctaatgtgagaagctcggatttttcgatgtcctgctttatggttgaaagcacttcctttgtaaaggcctcatcatgaatgatgacatttacctcttcattccagaacaggctccgtttatcaaaattcggcgtgccgataatgctgatgcggtcatctataatgaaggctttaacatgataaaagccttgataataccgatagatgaggcagccggccttcaggagctcgggataataggtaaaagctgtttcccgaacgagcgggtgatctgatttcatcggaacgatcaagatgactttgacgccttttcggcaggctgaaataagcgcttcctgaagctttttgctcggtacataataaggcgtgccgatgatgatttttttctccgccttacggatgcagttttcataatgcgattcaagcgaaaaaccgtcagatgcatatgtcctatgagagatattcccttcggataatgccggataaaccccgggtgattcgggtgtttttccggtgtttcgtttcaggtcgcttacaaaaagagtctgaagatctgccgtgccttcgccggtcatccgcaggtgataatcctcccagtttccgaacttcgctttttttccgaggtactcttcagcgatattaaagccgcccacatagccgattttgccgtcaatgacggtcactttccggtgattccgtttttgcagcctgaaaaaaagaaagggaaatgccggtttatttagaaaatgaacgtgaacgccggcttttttcatcgtttgaatggaaggctttttcacttggcggctgcccgcccaatcgagcagcagatatacggagacgccggcccgggccttttctttcaataaatcaaacatctcatggctgacttggtcgttcttcataataaaaaacatcatatgaatagaagagacggcttggcggatatcagccgtcatctgctgcacaagctcgctgccgcagtgaatgagtgtgatatcactttttttggggtcaaaaacgggctcatacgcctgttttttgtacgccgcccggccaagcagcatatcaagcagcataagtgcgatcaatatgataaaaatgacaagcaacacaaaaatgaccttcataccgacgctcctttccgaagtatccgtagtgtgccctgagaatgtgaatttaattattgactgaacactcattcattatttatgataaagtaaagatatgacaatgaagaggggaatcagaacaaagggggagacaagatgaacgcatttctcatggtaaacgcgctgctgttttcagctgtaaccgcttacgccgtttatttattcgtttacctgatcagaacgaggatcgcttatattaagctcggccaaagggaagaatttgataaacgcctgaaagaacgtcttcagaagatatgggtgaatgtgttcggacagaaaaaattgctgaaagataaaaagagcggaatcatccacgttctgtttttttacggttttatactcgttcagttcggcgcaattgattttattctgaaagggctgcttcctgaccggcatctgccgttcggcccgctttatccggcatttaccttttttcaggaaatcgtcacgtttctgattttaatcgccgtagtctgggcgttttaccggcgctacattgaaaagctcgtcagattgaaacgcgggtttaaagcggggcttgtcctgctgtttatcggcggactgatggtgacggtgctgctcgggaacgccatgaaccttttatggcacgatcattctctgtcttggacggaaccgatcgcttcctccattgcgtttgtgctcggcggtctttcagcgccggcggccgccgccgtgttttatgtttcatggtggcttcatctgttgtttttgctcagctttttagtgtacgtgccgcaatcaaagcatgcgcacttaattgcgggtccggcgaatgtgttcctcagcaggctggattcaaaaggaaagctggaaaaaatcgattttaccgatgagacgaaagaaagctacggcgtcggaaagattgaagacttccgccgctctcagcttgtcgacctttacgcctgcgtcgaatgcggccgctgtacaaatatgtgtccggcctccggtacgggcaagatgctctcgccgatggacctcattttaaagctcagagaccatttgacggaaaaaggcgctgccgtgacatcaaaatctccgtgggtgcccgcgcccgtttttcagcacacgaaggcgaatcagctcgccgcggcttcctcagggggaggatcgcgtgaagcggcggcagccattgattacaacccgagcttaatcggcgaggtcatcacggaagaggagatttgggcgtgcaccacttgccgcaactgtgaagatcaatgtccggtcatgaatgaacacgttgataaaattatcgatctgcgccgctatcttgtgcttacggaagggaagatggacagcgacgcgcagcgggccatgacaagcattgaaagacagggaaacccgtggggcttaaaccggaaagagcgggagaactggcgggagcaggctgatacagagattccgacagtgaaagaaatgaaaaaacaagacaaagagttcgactatttgttttgggtcggctcaatgggttcctacgacaacaggagccaaaagattgccgtttcatttgcaaagctgctcaatgaagcgggcgtatcctttgcgattctcggcaataaggaaaaaaactcaggcgatacgccgcgccgtttgggcaacgagtttctgttccaagagctggcggaacacaacatcggcgaatttgaaaaacacggaatcaaaaaaatcgtcacaattgatccgcacgcctataatatgttcaaaaatgaataccctgatttcggattccgggccgaagtctatcatcatactgaattattagccgagcttgtgtcacaggggaaactaaaaccgcttcacccggtcaatgaaacgattaccttccatgactcgtgctatttaggaagatacaacgaagtgtatgagccgccgagagcgatcttaaaagccattccgggcgttcaattgaaggaaatggagcgcagccgcgaaaacgggatgtgctgcggcgccgggggagggctcatgtggatggaagaagaaacgggagcgaggatcaacacggcccggactgagcaggcgctttctgtcagtccgacggtcatcagctccggatgtccttactgtctgaccatgctcggtgacgggacgaaagcgaaagaagccgaagacgcgatcggcacttatgatgtcagtgaattgctcgccatgtctgtattcggcgccgaaaaacaagagtctttatagaaagaagcgggccgccggcgcatatgccggcggctttgttttcgcacatcagccgatttatgaaggggcggctctaaaatttcttaaattacgctgtttagggtagcatattctgttttaatttgtttataatgagaggtatggtttatgaacaaaacaatacaaattcgttcttattataggatagaaacagatacatataagtaatagaaagggagtgtccgaccttgagtatcaaacaatattctcaggaacagctgaagcagatggctttagttgaaatcgctcacgaaattttctcagaacataaaaaaccggttccgttccaggagctgctgaatgaaatgatctccttactcggtgttacgaaagaggaactgggcgaccgtatcgcccaattttatacagacctcaacattgacggccgctttattgctctgtcagatcagacatgggggctccgcagctggtatccgtacgatcagctggacgaagaaacacagccgactgtaaaagcgaaaaagaaaaaagcgaaaaaagccgttgaggaagatctcgaccttgatgaattcgaggaagttgatgaagatgacatcgatctcgatgaaatggaagaagatattgaccttgacgcagacagctttgacgacgaagatatcgatgaagaagatgacgacgagcttgagattgaagatgagatgattgaagaagatgaggaagattatgatgatgaggaagaggatcgcaaagactgattttatatcagcaaaacgatcttgactttcattgtcgaactatgtagtatgtattttgggctcttcaaaaagaagagaattcataagagtgctacgctccctttcaagaaattgaaagggagctttcttattttcatctcccaaattcttttacacatcatttgtttttagtgaaatgattttctataaaacggcacattttaaggaatgtagcgcagaccgaagagaggagcaaacgaaatgacgaaatatatttttgtaaccgggggagttgtatcatcactcggaaaaggaattgtggcagcatcacttggccgccttttgaaaaacagaggcatgagcgtcaccatccaaaaatttgacccttatatcaacgttgacccgggaacgatgagcccgtaccagcacggtgaggtattcgttaccgatgacggcgctgagactgaccttgacttagggcattatgagcggttcattgacattaatctgaacagattcagcaacgtgacgacaggtaaaatctattctgccgtattgaaaaaagagcgccgcggggactacctcggcggaacggttcaggtcattccgcacatcacaaatgaactgaaagaccgtgtgtaccgtgcaggcaaagaaacaaacgcagatgtagtcattactgagatcggcggaacagtgggagacatcgaatctcttccgttccttgaagccatccgtcaaatgaaaagcgacatcggccatgaaaacgtgatgtacattcactgtacgcttgttccgtacatcaaagcggcgggcgagctgaaaacaaaaccgacgcagcacagcgtaaaagagctgagaagcctcggtattcagcctaatatcatcgttgtgcgcacggaaatgccgatttctcaagatatgaaagataaaattgcgctcttctgcgatattgacacgaaagcggtcatcgagtgtgaagatgcggacaacctttactccatcccgcttaaccttcaggagcagggactcgataagcttgtctgcgatcatatgaaattagaatgcaaagacccggatatgacggaatggaaagaccttgtcacgaaagtgaaaaacttgtctaaaaccattacaatcagccttgtcggtaaatacgtcgagcttcaggacgcttacatttcagtcgttgaatcactgcgccacgcgggctatgcgtttgacgctgatgtgaagatcaaatggattaacgccgaagaagtgacagaaagcaatattcaagagctgactggcggcacagacggaatcatcgtgcccggcggtttcggggaccgcggcgtagaagggaaaatcatcgccgccaagtatgcgcgtgagaataaaattccgttcttcggcatctgcctcgggatgcagattgcatccattgaatatgcgcgaaacgtattaggtctggaaggggctcactctgcggagatcgatccgtccactccttatccgatcatcgaccttctgccagaacaaaaagatgtcgaggatcttggaggaacgcttcgtctcggactgtacccttgtaagcttcaggaagacacgaaagccttcgaagcgtattcggatgaagtggtatacgaacgccaccgccaccgttatgaattcaacaacgaatacagacagcaaatggaagagaacggttttgtgttctcaggaacaagccctgacggccgtcttgtggaaatcatcgagctgaaagaccatccttggtatgtcgcttgccagttccaccctgagttcaaatcaagaccgacaagacctcagcctttattcaaagactttatcggcgcttccgtacaagctgcagaacagaagtaataaaaaaagacttgcctcctttaaaagcggcaagtcttttttctgcatcaggcatattcctgcatcatttcctttaacgtaaaggacagcgcgtgatagacatacaggcctgtcattaatgaaggaaagccgtatcttgtcccgtcttcatcgggcagaagcggcatttttaatttgctgtcaatatgaacatcacaaaattcctcaatcccggtttgatctttgatgacaggagatacgcaaacgaggccgacccctttttcataaagcttttgagccagcgcctgttcttcagccgtgcccggacctgaacaaaacatcagcaccctgtcgctttctgtaatcgaatcagctgtatccggaaacgctttgacagaaggcatcggttctgagccgagttccgcctcgcacaaaatgccctgcatctcatttgcgccgtataaataaatggtatgaccgctgacggctgcctgcgccagcaggcgcgcgccgtcttctattgcatcggactccttatcctgaatgcgggaaaaaatgcctgcaagctgcgtcgtaaatatctttaacatgagtgaaacctcctttacacatacaagaacagtatacaacaaaagagaaaatgctcagaaaatgtcggaaagtagactattataattaaaggaaatgtgaaaatcaaacagaatacataaacaactgcttccttttgacgaaaatgataatattggggtgtaaaatgatgaatgaaaagattttaatcgtagatgaccaatacggtatacgcatattgctcaatgaagtgttccataaagaagggtaccagacgtttcaggccgccaacggcatacaggcgctggacatcgtaacgaaagaacggcccgatctcgtgcttttagatatgaaaatccccggcatggacggaatcgaaattctcaagcgcatgaagatgatcgacgaatccatccgcgtcattatcatgaccgcttacggagaactcgatatgattaaggaatcaaaagagctcggagcgctgactcattttgcgaaaccttttgacattgatgagatcagagacgcggtgaaaaaatatttacctctaaaatcgaattaataaaattagaaacaattatgtcattgtgttgccgatttgtcgaaaagttggtatcctagagatggagaaaaagcgatctgttgttttacatatgacaggtttttatggtcatgctataggtggaaagcttttttcgagaagaagcaaatcaggctacataaggaggactttcgacatgcctttagtttcaatgacggaaatgttgaatacagctaaagaaaaaggatatgctgttggacaatttaacttaaataaccttgagttcactcaagctattttacaagcagcagaagaggaaaaatccccggttattcttggtgtttcagaaggcgcgggacgctacatgggcggcttcaaaacagtggttgccatggttaaagctcttatggaagaatacaaagtgacagttcctgtcgcgattcacttagaccacggttcaagctttgaatcttgtgcgaaagcgattcatgcaggtttcacttctgtaatgatcgacgcatctcaccatccgtttgaggaaaacgtagcaactacagctaaagtggttgagcttgctcatttccacggcgtttcagttgaagctgagcttggaactgtaggcggacaggaagatgacgtgatcgctgaaggcgtaatctatgctgaccctaaagagtgtcaagaacttgtagagcgcactggcatcgactgccttgcacctgcactgggttctgttcacggcccttacaaaggcgaaccgaacctcggtttcaaagaaatggaagatatcggcaaatcaaccggccttccgttagtacttcacggcggtacaggaattccgactgccgacattaaaaaatcaatctcacttggtacggctaaaatcaacgtaaacactgaaaaccaaatttcttctgcaaaagctgtccgcgaaacattggcagctaagccgaacgaatacgatcctcgtaaatatcttggacctgctcgtgaagcgatcaaagaaacggttatcggcaaaatgcgtgagttcggttcttcaaaccaagcttaatccaatgtaacatccataaaccgcctgacagcattgacaggcggttttatgtcttacctttagaaagcgcaatcatgttttacagttctgaaaatttattactggggaggctttccttatgttatttttcattgatacagcaaacattgacgagattaaagaagcttatgaacttggcgttcttgccggagttacgacaaaccctagtttagtggcgaaagaagctgacgtgtctttccatgacagacttcgtgagattacggaagtcgtgagcggatcagtaagcgcggaagtcatttccctgaatgctgaagaaatgattgaagaaggtaaagaacttgcgaaaatcgcgccgaatattacggtgaaaatcccgatgacgtctgaagggttaaaagccgtaaaagcgctgagcgacctgaacattaaaacaaacgtaacgctcattttcagcgccaaccaggcgcttttggcggcaagagccggggcgacttatgtatctccgttcttaggccgtctggatgacatcggccataacggtcttgaactgatttcagaaataagacagatttttgacattcatgacattgatactcaaatcatcgcagcttccatccgtcatgcgcagcacgtgactgaagccgctttacgcggtgcgcatatcggtacgatgccgctgaaagtcattcaccagctgacgaaacatccgttaacggataaaggcatcgagcaattcttggctgactggaataaataagggggaaaagggcggcaaaccggttgcatccgtttgccgcacccttatgttttcctgtttggcagcgggccttcagtatcaaagtgaagagtgtgtttccccggaatatgaacccggcgggcctctgtgcatcctgtgttaaaaatgccccgcaaagcttcgctattttcttcctgttattttataatgtccttgtattctttctcttcgaattggctacattttggacaagagctttatttgcagagacagaataaaatgccattttatttacgctccgcagctatcttcttatggaaggagactatcatggaaaagttgaatattgccggcggcgatccgttaaacggaaccgtacatatcagcggtgcgaaaaacagcgccgtcgcattgatacccgcaaccattctggcaaattccgaagtaacgatcgaagggcttccggagatctcagatattgaaacgctgcgtgacctgctgaaagaaatcggcggaaacgtccattttgaaaaaggagaaatggtcgttgacccttccccgatgatcagcatgccgcttcccaacggcaaagtgaaaaaactccgcgcttcctattacttaatgggcgcgatgctcggccgcttcaaacaggcggtcatcggactgccgggcggatgccatctcggtccgcggccgattgaccagcatatcaaagggtttgaggcgcttggagcggaagtcaccaatgaacaaggcgcgatttatctgcgcgccgaaaggctgagaggcgcacggatttatttagatgtcgtcagcgtcggagcgacgattaatatcatgcttgccgctgtactggctgaaggtaaaaccgtgatagaaaacgccgccaaggaacctgagattattgatgttgccacattgctcaccagcatgggcgcaaagatcaaaggtgcgggaaccaatgtaatcagaatcgacggcgtaaaagagctgcacggatgcaggcatacgatcattccggacagaattgaggcgggcacctttatgatcgccggcgccgcgatggggaaagaagtcattattgataatgtcataccgactcacctggagtctttaacggcgaagctcagggaaatgggtttttacattgagacgagtgacgatcagcttcttatgctcggcgggcagaagcagataaaaccggtcgacgtgaaaacgcttgtttacccgggattcccgactgatcttcagcagccgatgacatctctgttaacgagagccagcggcacgagcgtcgtaaccgacaccatctactcggcccgatttaaacatattgatgagctgagacggatgggggccaatatgaaagtggaaggcaggtcggccattatcaccggtccggccgagcttcagggcgcaaaagtaaaggcgagcgatctgcgtgcaggcgcttgtctggtcgtcgccgggctcatggctgacggcgtaaccgaaattaccggtcttgagcatttagaccgcggctacagcaatcttgagaaaaaactcgaaggtctgggcgccacaatctggcggcaaaggctgacggacgaagagatagaacagctccaaaattcatagaaatgcggacttttgagaggagatcgtgttgaaatggaaagaagcttatcgatggaattggttcgagtcactgaagcggcggctttagcatctgccagatggatgggccgcgggaaaaaagatgaagctgatgatgcggcgacaagcgcaatgcgtgacgtgtttgacacggtgccgatgaaaggcacggtcgtgatcggggaaggcgagatggatgaagcgccgatgctttacatcggcgaaaagcttggaaacggatacggcccgcgcgtcgatgtcgccgtcgatcctcttgaaggcacaaacatcgtagcgagcggcggctggaatgcgctgacggtgatcgcggtcgccgaccatggaacattgctgaacgccccggatatgtatatggaaaaaatcgcggtcggtcccgaagcggtaggctgcatcgatatcgaagcgcctgtcattgataacttaaaagccgttgcgaaagcgaaaaacaaagacattgaagatgtcgtggcaaccattttaaatcgtgacagacacgaaaaaatcatctctgaattgcgtgaggcgggcgccagaatcaaactgatcaacgacggtgatgtcgcgggcgccatcaatacggcctttgaccatacgggagtagacattctcttcggttcaggcggggctcctgaaggcgtgctgtctgccgttgcgttaaaagcgctcggcggcgaaatcatcggcaggcttctgccgcaaagtgcggaagagcaggcccgctgtgagcgaatgggccttgatgtatccaaagtgctccggatggaggaccttgtgagaggggatgacgccatttttgccgcaacgggtgtcacggacggagagctgctgaaaggcgttcagttcaaaggctccgtcggcacgactgaaagcctggtcatccgggcgaaatcaggaacggtccgattcgttgacggaagacacagcctgaagaaaaaaccaaatcttgtgatccggccataaatagagaaaagcgggacggaaagtcccgcttttcttttgcaaaaaagagtcaaccctatcatttatatgtcaaagcattatttaagttgaataattttttgaaatgaggtaaaaataaagagtgctgcgatttttctgtgtcattccttcttttgagtactgggaaattttcaaattctaccgcatacagacgatataaatattgatcttctcaagtttttgtcctcgcttccttcaaaactcattaagacattccttttttaaaaaagcgccgatcatgggtggaagtgttaccgatagaagttcctgaacgttttataaaagaatgtgctttggcggaatcatgcgaagcagccgatttgaatgaaaacagcaatacattgactatgaaaagcgtggtgtttttatgaaagacgtatctatttcctctttggaaaatatgaaattaaaagaactatatgaactggccagacattataaaatctcctactacagcaaactgactaaaaaagaattaatctttgccatcctgaaagccaacgccgagcaggaggatcttctgtttatggaaggcgtgctcgaaatcatccaatcggaaggattcggcttcctcagaccgattaattactcgccaagctcagaagacatctacatttctgcttcccagatccgccgctttgatttaagaaacggtgacaaagtatccggcaaggtgcgtccgccgaaagaaaacgaacgctattacggacttttgcacgttgaagcggtaaatggagacgatccggaatctgcgaaagagcgcgttcattttcctgcgctgactccgctttatccggaccgccaaatggtgcttgagacgaaaccgaactatctctcaacaagaattctcgatatgatggctcccgtcggtttcggccagcgcggtctgatcgtggcgccgccgaaagccggtaaaaccatgctgttaaaagaaatcgctaacagcattacgacaaatcagcctgacgctgaattgatcgtgctcttaattgatgaaagaccggaagaagtaacggatattgaacgttccgtagcgggcgatgtcgtcagctcgacgttcgatgaagtgccggaaaatcacattaaggtagcggagcttgtgcttgaacgggcgatgcgtctcgttgaacacaaaaaagacgttatcattctgatggacagcattacccgcctggcacgggcctacaacctcgttatcccgccaagcggacgtacgctttccggcgggattgacccggctgcgttccatcgtccgaagcgctttttcggtgccgcgagaaacattgaagagggcggcagcctgaccattttggcgacggcgctcgtagacacgggctcccggatggatgacgtcatctatgaagagtttaaaggaacgggcaacatggagcttcaccttgaccgttctcttgcggaaagacggattttcccggcgatcgatatccgccgctccggcacgcggaaggaagagctgctcgtgccgaaagagcatcttgaccgtctatgggcgatccgcaaatcgatgtctgattctccggacttcgcagagaagtttatgagaaaaatgaaaaaaacaaaaacgaatcaggaattcttcgatctgatcaaccaagaatggaagcaggcaaacctttcatcatcagcccgccgctgataaaaaatgtatttgcaaatgcagtaaatgactgatataattctctcatatgcgttccggattcgctccggaataataactctgtttccacacgggattcagggcggaaggagatggatacaatgaaagcaggaattcatcctaatttcaaaaaagcaacagttaaatgcgcttgcggaaatgaatttgaaacaggctcagtaaaagaagaggtacgcgttgagatttgctctgaatgccacccattctacactggacgtcaaaaattcgcttctgctgatggtcgtgttgatcgctttaacaaaaaatacggtcttaagtaataatagattttacaggcaggcaagaattgcttcttgcctgttttttatgtccataaacaggaaaaaaaggggagcggatagcctatgtacataatgaagcaaagcggatggcttgagctgatatgcggcagcatgttctctgggaaatcagaagagctgatccgcagagtgaaaagagcgacatatgcgaagcaggaggtcaaggtgttcaaacctgccattgataatcgctacagtgaggaggctgtcgtttctcacaacggcacatccatgacaagccacgtcatctcgtcttcggctgaaatatgggatcatatcagtgaaagcacggacgtcatcgcggtagatgaagtgcagtttttcggcgaatcaatcatcggcgatttatccttgcttgcggataaaggctatcgtgtcatcgcggccggacttgatatggatttccggggagagccgttcggtgtggtgccgaatctgatggcggttgccgaatcagtgacgaagctgcaggcggtctgctccgtttgcgggtcgccggcaagccgtacgcagcgtttgattgacgggaagcccgcttcctatgatgatccggtcattttagtcggcgcgtcggagtcatacgaagcgagatgcagacatcaccacgaagtgctgaaaaaacagactgataaataacccttttcatgaaaacatcggtaaaaaatccggtgtttttttgacggtttttcaaaaattgtagttaattaacttaaaaaagagtatgaaaaaattaagtaattttcatctcttgaattttcatttttacaggcataaaatgactaagtaatgtaaatagttatgagacattgttcgaataattgtcaaaaaaagatatagcagatcgcgatcacactagccaaaatgggtaattacttaactttgttaactatttgaagaaagaaggagattttcttgaataatattaaagtaacgaaggaaggcaacttagaaactactttaagaggaaaagaagttctatctatccctactttaaataaaggtgttgcgttttcagcagaagaaagaaaaagccttggattagacgggctgcttcctccgaccattctgtctcttgatgagcaggcaaaacgcgcatacgagcagtttcaagctcagccggaccgccttcgccaaaacgtgtatttgaatgatttgcaaaaccgtaacgaagttcttttctttaaattgcttcaaaaccatcttcgtgaaatgctgccggttgtttacacaccgactgtcggtgaagcgattcaagaatacagccatgagtacagaagacctcaagggatttacctttctatcgacaatgtagaaggaatcgaagaggcatttgaaaaccttcatgccactgccggagatattgatctgatcgttgcgacagactcagaaagcatcctcggaatcggtgactggggtgtaggcggtatcaacatcgccatcggtaaattagccgtatacacagctgctgccggtattgacccaagccgtgttattcctgtcgttcttgacgtcggtacgaacaacgaaaaacttctgaacgatcctttatacatcggtaaccgccatgaacgtatccaaggcgaacgttatgaagctttcattgacgcttatgtaaaagctgcgcttaaatatttccctaaagctcttcttcactgggaagaccttggaaacaaaaacgcgcgcaatatcatgaagaaatacaatcatgaaattcttacattcaacgatgacattcaaggaacaggcgcgattacgcttgcaggtgtgcttgcggctatgaagaaaacaggcgcgtctattaaagaccagcgtgtggttgtcttcggtgcgggatctgccggaatcggaatcgctgaccaaatccgcgacactatggtgcttgccggtctttctgaagaagaagccaacaaagcgttctacacaatggactacagaggcttgttaattgaaggtatggaaaacattcttgatttccaagagccgtacctgcgcacagctgaagaaattaaagattggaaacgcgatgaaaacggacaaattcctttcattgaagtgatccgtcaagcgaaaccgacaatcttaatcggtacatcaggccaaagcggcgcgttcagtgaagaaatcgtcaaagaaatggcaaaacacgttgagcgtccggtcatcatgccgatgtctaacccgacaccgcttgctgaagccgttcctagcgatctattcaaatggactgacggcaaagtgcttgtggcgacaggaagcccgtttgacaatgtagagtacaatggcgtttctcatgaaatcggacaatctaacaacgcattcgcgttccctggacttggtctcggttcaatcgttgtagaagcgaaagtgattactcctgcaatgtttgcggcaactgctgacgcaatcgcagaaagcgttgattttgaaacaccgggtgcaggccttctgccgagcatgagcgacttacaagaagtttcaattaaagttgcgatcgccgtagcggaaactgccattaaagaaggcgtggcaaaccgcattcctgagaatgtagaacaagccgttcttgatgcaatgtggaaaccgcaatataaacaagttatcgctaaataatttttacgattaattttacagtccgagggaaagcttttatgtaaaggctaaagtatacggacattaaggatttggaggagaatattttgagcttcttagatattttaatcctcctggcgccgatctttttcgtgatcgtgctgggatggttcgcaggtcgcttcggaagttatgacgcgaagtcagcaaaaggggtaagcaccttagttacgaagtacgcgcttccggcgcattttatcgcaagtattttaaccacttcaagaagtgcgtttttatcacaggttcctttaatgatcgctttgatcattgggattgtcggattctttatcgtcattttgttggtttgcaaatttatcttcaagtatgatttaacgaattcatctgtattttctttaaactctgcacagccgacatttgcatttatgggtattccggtactcggaagcttattcggagcaaacgaagtagcgattcctatcgccgttacgggtatcgtggttaacgccatccttgacccgcttgcgatcattatcgctacagtcggtgagtcatctaagaaacaagacagcgaaaacgagaacttctggaaaatgactggtaagtctattcttcacggtctttccgaaccgcttgcggctgcaccgcttatcagtatcatcctggtactctgcggtgtaacactccctggcttgggtgaaaaaatgcttgatcagctcggaagcacaacatcaggtgttgcactctttgccgtcggtgtaactgtcggtatccgcaacatcaagctcagtctgccggctttcggtatcgctttgttaaaagttgccgttcagcctgcgctgatgtacttgatcgctcttgcagtcggacttccggctgaccagatcactaaagcggtattgctcgtcgcattccctggatctgcggtagcggcgatgattgccacacgtttcgaaaaacaagaggaagaaactgcgtccgcgttcgtgatcagtgcgattttatctcttatctcactgccgatcatcattgcgctgactgcataatgaaaagctccctgtttcagggagcttttttgattagaattgaaatttaaaaggcgaaaatctcgttttttttctgggtttcttatgttctgaagaagcggctgtttctgagaggggagctgtctgggcaagttcctggatgcgggaggccaatgtctgcaattcggtattgaggtcgtcaatttcccgtctgtgctgaagaagctgataagacaccccttcatccgccttttgtttcagctggcgttcaagctcctctatccttgaaagcagatggttctcatcctgtttctctttcgtgagaatgtccagtttgcgctccagctctgccaacctttgttcagcgccgccattgattttcggacgctgcaaaatgaagcccgtccgttttttcggctgccggggcacttgaacgtccagaagggcagtgccttcagaaatttgccgtttgaccgatttcagcacatcaagatcctcaggtgtaaaggaataatgtccgagctcattccgttcagccggaagattcagctgcttgacccacctttgcaccgtttttgcggagacgccgagctctttcgcggccatgtttgtattcatgatcacatacctcctttttgctaggtattcgaccatgaggcggcgttcccttcatgttagacaaaacaagaaggaattcgccaaagaaagcggcatttcttcaaaaaacgttacgcttcatacaattcaagcggaagcttgtcgggatcgaagaaaaaggtaaaccgtttccccgtcagcggatcggttctgatcggttctgtgccgacgccctttttctttaactccctgacggctgcttcaagatcgtttacggtgaaggcgagatgccggagacccgcggcttccggtctggtcggccgttcgggcggatcgggaaaggaaaacaattcaatcgcatacgcgccgtccagcgccagatcgagtttataagattcccgttcctttcggtatgtttcttttataatgccgaaaccgagtatctcggtgtaaaaagctttcgacttttcataatcagagcatatgattgctatatggtggatggatttcagcatatccgcccctccttttttgcttcagtataacagaggcgaattgcttttgactggtgataagccctatactataatgagaatgttacgcacaggaaaacagaggtgaagaccgtgttagaccgtttacagtcaattgaacaacgatacgaaaaattaaatgagcttttaagtgatccggaagtggtcaacgatccgaaaaagcttagagaatattcgaaagagcaatctgatatacaagaaaccgttgaagtctatagacaatacagagacgcatcagaacagcttgccgatgcgaaagcgatgcttgaggaaaagcttgatgccgatatgagagaaatggtgaaggaagaaatctccgaactgcagggagagacggaaaccttatcagagcgtttgaaagtgctcctcatcccgaaagacccgaacgatgacaaaaacgtaatcatggagatccgcggagcagcgggaggagaagaagccgcgctgtttgcgggaaatctctacagaatgtactcccgttacgctgaaatccaaggctggaagactgaagtcatggaagcaaacgtgaccggaacgggcggttacaaagaaatcatctttatgattacgggaaaaggcgcatactccaagctgaagtatgaaaatggcgcgcaccgcgtacagcgtgtgccggaaacggaatcaggcggccgtattcatacatccacggcgacggtggcgtgtcttcctgaagcggaagaagtagaagtggacatccacgaaaaagacatccgcgtcgatacattcgcatcaagcggaccgggcggacaaagcgtaaatacgacgatgtcggccgtacgcctgacgcatttaccgaccggtgtcgtcgtatcctgtcaggatgaaaaatctcagattaaaaataaagaaaaagcgatgaaggtgctccgcgccagaatctatgacaaattccagcaggaagctcaggctgaatatgatcagacccgtaaatcagccgtcggatcaggcgaccgttccgagcgtatccgcacatacaatttcccgcaaaaccgtgtgacggatcaccgtatcggcctgacgattcaaaagctggatcaaatcctggaaggcaagcttgatgaagtggttgaagcgttaatcgtagaagaccagtcaagcaagctccagcaggcggaaaattaagatgaagaccgtttttgaagccctaagctgggcttcttcttatttaaccgaagcgggaagagaaaaaaacgcggccgagctgctgctgttaaatgataccggaatggatcggagcaagcttctcgcaagtctgcaggagcccgtcggcgaggacgagctttaccgattcagacggcatgtggaaatgcataaagaaggcgttccgattcaatatattatcgggaaagaacagttttacggcagagaattctttgtgaatgacgatgttctcattccgcgtccggaaacggaagaagtcgtctttcatctgctggacagacagaagcgggtgttttctgagggagaacgcctgaacgtcattgatatcggtacggggagcggagccattgcggtgacgctcgcgcttgaatgcggacatttttcagtatcggcttcggacatttcaaaagaagcgcttcaggtggcggaaagaaatgcgcaaaacctcggagcggacgtccgctttttgcagggagatctgttaactccttttatttcatcaggaataaaagcggatattattgtttccaatccgccgtatatttctgaagaagaaatggcggatttgtcggatatcgtccgtttccatgagccgcttcatgcacttacggacggcggtgacggtttgaaattctacaagcggtttatggaggagctgcctcttgtcatgaaagataaagcgcttgtcgtctttgaaatcggatataatcagggaaaagccgtgaaagacctgttccgtcattcctttccgaatgcggaagtggaagtcgtacaggacatcaacggaaaagacagaaccgtatccgcggtcatcacatcatgaaaaaagcccgccggtgacgcacacggcgggcttttgttacaatggaaagaaaatgaaaggggcatccgccttgaaaaaagcgttcgccttcggatgtatactcgccgccgcagcttatgcggctggatttgtcctgccgtttggctttgacatcattctcggcgccgttacggctgttcttatcgtcgcagcggtcatcgtttccgggctggccgtaagcggagcggagcagcgggccaattatcattctgaaacagaagaaggacggcgcgcccgtttaaagatggccgccgttttcttttgcgccgctctcccttcagccggctgtctgctgattacgcttctgtagccggattttgtctttgcagcaatacggaatcccatacccaatagacgacggctgttaaaaccgcaaagatataaaaggctgaattagaaaacagagattggcctgacggctgcaaaagaccgaagatgatcccgtttgcaatgaacgacacccccaaataataaagaaaatacagcggatgaaatctcttcggctttttattcagaaagtattgaagcggcagcgcaaaaatcaaataaggaaacaaaaaataaaacgccatcgaaatgaaagccgcgataatgaattgatgaacatacaaaatagaataaatgacagacatacatgccgccgacagcagcacggtgtaattatatttcatctgaaaacctcctatcaaaataatatcgtaccatattttgaatctgtcaatgcagattatcagcttgctagatttttttcttcccgccggtttaaaccttttccgtcatgtccataatgggactagataaaaaaagcacggagaggaacggtggggaccgatgaaacagacaatgatgatctgcatatatatttttcttttattatcaggagcgcttgcgggtttgacaaaagaagaaacggcgcgggcatcagccgatgagcccgtcgtcataccggatgaagcgatccggctcaggattttggccaacagtgataacgatgaggatcaaaagctcaagcgccagatcagagatgctgtaaacaagcaaatcacggactgggtgaaagatatcacttccattgaagaagcgcggcggctcattcgttcgaagcttcctgaaattaaagaaatcgccaaacaaacgatgaaagaaaagggtgcgcatcaatccgtttcagttcaattcaataaaatctcgtttccgacaaagctgtacggcaatatggtctatccggccggaaaatatgaagccattttaattacactcggcaatggcgagggcgccaactggtggtgcgtcttgtttccgccgctgtgcttccttgatttctcaaacggcgaagcggtgaaagatcaggaagacggcggacagaagcaggaagaaacgcagaaacagacagaaaaagtgctggatgacgtaaaagcaaaggccgataaagcgaagaaagaaaataaagatgacgatgataccgaagtgaagtttttcctcgtcgattggatttcagatctattttcctgaagcaaaaggcataaatccggattcgattcatagattggaagaaagagttgatcgaaacggagggaaatatatgttttatcagctgagagtggcaagagatcaagatacggaggcgctggaggcctttttgaaaaagtctgatacggcacatgcggaaatcgatcagcagatcagccggtttatcgtgctggaagacagcgaaaaaaagattgccgcctgtctcgggatcgaaaaattcagcggcggaaaagggcttctccgttcactcgtcatgtcggacaggctgaatcaaagccatatcgttacactgtttcaaagtatggatgtgctgtgcaaaaaacatgaaattcaagatgtctacttagtcgccaatcagccctcatctgctgagtttctgaatgtgatgggatttgaagcgtgcgccgatgcgcctgaggaactgtatacgtccgaacatttccgcaactcgttatgcacagaaggttcgtttttaatggtgaaaacctctgcctgatctaacttatacacaaggttatccacttattaaaaagtgttgtccacagtttgtggataacgcttgttttattaaaggacatcttttatactttcaaaaggaatacacgagagaaaataaagttttaccgctttaaaataaggagtttggttatacatgaaaacaagaagatggtttgtggattgttccgcagaattatccacaaccgatccccaaattacacaagccgcggaattgctccggcagaatgaggttgtggcttttccgacagaaaccgtttacggactgggcgctaacgctgaaaatacggaagccgtaacgaaaatatatgaggcgaaaggaaggccgagcgataacccgctgattgtgcatatatcccatatcagccagcttgatcgttttatcagccatattcctgagacggcgaaaaagcttatggagctattctggccggggcgctgacccttgtcctgccgtgtaagcccggtgtgctgtcaccccgtgtcaccgcgggactggagacggtagcggtcagaatgcctgatcatccggcagcattagccctcatcagctcggccggactgccgatcgccgcgccgagcgccaatttatcaggaaaaccgagcccgacgaaggccgagcatgtagctcatgatttaaacggccgtattgccggtattgtggacggcggcgcgacgggaatcggagtggaatcaaccgttctgtcctgtacggggaaacagcccgtgctgcttcgtccgggcggcgtgacaaaagagcagattgaatccgccgccggtccggttcttgtggataaaggactgaccgaagaagatgaggttcctatttctcccggtatgaaatatacacattacgcgccttctgcgccgatggctattgccgacggcggcgcccggagaattcaagaactggcagacgcatataaaagccggggaaaacgaatcggcattttgacaacagaagagaacgccgatagttaccaggctgattatatcaaggtctgcggcagacgcgccgaccttgaaacagtggcgtccgccttatacgatgcgctccgcagctttgatgaagcggaagtggatatgattatttctgagtcctttccggataccggagtggggctcgccgttatgaacaggctgatgaaagccgcaggcggcaccgttatccattaacttgttctaccccttatcggacatgcataagctaaacaagcgggcacgtccaaggggtttttattcatgtcgaatctattcatcggggaacttgtctccttaagcatcatggcatttgctttggggacggatgccttttccgtcgggctcggaatgggaatgattcagctgaagaaaaaacagatttttcatataggggttgtcatcgggctgtttcatgtcatgatgccgcttgtaggaatggcggccgggcatctgctgtccggttttctggggatgctcgccgtttacatcggcggatctcttcttttcattttaggggtgcagatgatgatcgccgcgtttaaacaatcggacgggccgctcatatctccggcaggctcgggactgttgctgtttgcggtcggtgtcagtctggacagcttttctgtcgggctcagtctcgggatgaacggctccaatccgtttctggccgttacgctgttcggggtcttcagcaccgttttaacatgggcgggccttttggcgggaagaaaggtgcagtcatggctcggctcctacagcgaagcgcttggcggagccattttgatcggattcgggctgaaactgcttttaccgatataagatacgtaaaaaaagaaacgaagatgccgtttcttttttcttcatttataataggtagtaagaggtgacggacatgaaaataatctttgtttgtacaggcaatacgtgccgcagtcccatggctgaggctctttttaaatccatagcagaaacgaaagggctggatgtcagcgtaagctcggccggcgtattcgcgtctccgcacggaaaagcgtcggctcatgccgtagaagcgctgtttgaaaaacggatcgccctcaatcacagttcatctcccttatcggaagaacatatcgagacggccgatctggtgctggcgatgaccgaacagcataaacagctgattgaaggccgatatcaaaacagtcagggcaaagtttttaccattaaagaatacgtgacgggggaaagcggcgatatctctgacccgttcggcggtccgcttgatgtttataaacagacgcgggacgaactggaggagctgctgacccttttggctgatcaattgcttgacgggaaaagcaagtaatctgtcagaaaatctgcaaacaggtcatttgcaaaacgaatgtgaaagagtagaatgaaatcaacggatttcgtaataaaaaggacaagcacactgggctgtcttcgcccagccacacctaggaggtaaatgaatgaaagtagctattgcgtcagatcacggcggcgtccatatccgcgaagaaataaaaagtcttttggatgaattgcagattgaatacattgatatgggctgtgaatgcggcgccggctctgtcgattattcagactacgcttttccggtagcggaaaaagtggtgaacggcgaagctgacaggggaattttaatttgcggcacaggcatcggcatgagcatctccgcaaataaggtaaagggcatacgctgtgcgcttgcccatgacaccttcagcgcaaaagcgacgcgtgaacacaatgacacgaatgttcttgcgatgggcgaacgcgtcatcggcccggggctggcgcgcgaaatcgcaaaagtctggctgacgactgaatttacgggcggccgccacgaacggcggatcggcaaaatcgcagattacgaagaaaaaaatctgtaagaggtgctggacaatggaagagatgaagcaaaaatggacggacatgctgactgagtttcaagagcaggcaggactgacggacggcagtctgctggtggtcgggtgcagtacaagtgaagccgccggaagccggatcggcaccgccggaagcggggattgggctgaattgatatacggcggacttaaccggtttaaggaaaaaacgggtgtgcatcttgcttttcaatgctgcgagcatttaaacagggcgcttgtcattgaagcggaaacggccgagcggttcaggctccccattgtttcagccgtccccgtcccgaaagcgggcggagcgatggcctcttatgcataccggcagatgcgttctccagtgctcgctgaatcgattcaggctgacgccgggattgacatcggtgatacgttcatcggcatgcatctgaaacccgttgccgtccctgtccggatatcgagccgtgagcttggagaagcacatgtgacgatggcccggacaagaccgaagctgataggcggaattcgcgccgtatatgaatgcgaatgatgaaaatacttttcctctataatgttcgtgttttctaattaaattttgtgatttttttaaataagctgttacattcacctgaaaaaccatgtacaataaggtggtaaaaataaagaacaggaaacggataggagaggatctcgctgatgaaacatttacctgtacaagataaacaagtgtttaacgccatcaaagatgagcgtaagcgtcaacagactaagatcgaattaattgcttctgaaaacttcgtgacggaagcggtaatggaagcacaaggctctgttttaacaaacaaatatgctgaaggctaccccggcaaacgctactacggcggctgtgagcatgttgatgtcgttgaggacatcgcccgcgaccgcgcgaaagagattttcggagctgagcatgtaaacgttcagccgcactcaggcgctcaggcgaacatggctgtttacttcacgattttagagcacggcgacacggtgctcgggatgaacctctcccacggcggccacttaacacacggaagcccggttaatttcagcggcgttcaatacaactttgtagaatacggtgtcgataaagacacgcaatatatagattatgaagatgtgcgtgaaaaagcgctggcgcataagccgaaactcatcgttgccggagcgagcgcatacccccgcacgatcgactttaaaaaattccgtgaaatcgctgatgaagtcggcgcttacttcatggtagacatggcgcatatcgcgggtcttgtcgcagccggccttcatccgaatccggttccttacgctgactttgtaacgacaacgactcacaaaacacttcgcggaccccgcggaggaatgatcctttgccgtgaagagttcggcaagaagattgataaatccattttcccgggaatccaaggcggaccgcttatgcatgtcatcgcggcaaaagccgtttctttcggagaagtgcttgaagatgatttcaaaacatatgcgcaaaacgtcatctcgaacgcgaagcgcctggctgagtctctgaacaaagagggtattcagctcgtatcaggcggaacggataaccaccttgtgcttgtcgacctccgttctctcggactgaccggaaaagtcgctgaacacgttcttgatgaaatcggcattacatctaataaaaacgcgatcccttacgatccggaaaaaccgttcgtcacaagcggaatccgtctcggtacggcggctgtgacaagccgcggctttgacggtgacgcgcttgaagaagtcggcgccatcatcggcctcgcgctgaaaaatcatgaagacgaagcaaaacttgaagaagcgaaacagcgcgtatctgccttgactgaaaagtttcctttatataaagaactggactattaataaggaagaaacccgccggaaccttaatccggcgggtttttttatgattttcttgaaactgtttgtctttttctgtagaatcaatagaagtgtgaaaaagtcactcggacaacaaaaaaggagctgaacacagtatgggaaaggtttacgtatttgatcatcctttaatccagcataagctgacatatattcggaatgaaaatacaggcacaaaggatttcagagaccttgtggatgaagtcgcatcactgatggcgtttgaaattacacgtgatcttcctcttaaagaagtggaagtgaaaacacctgttcaaacagcgacatccaaagtgatttcagggaagaaactcggtatcgtgccgatcctgagagcgggtctcggaatggttgacggcatgctgaaattaatcccggccgctaaagtgggacatgtcggattataccgtgatccggaaaccttaaaaccggtggaatactatgtcaagcttccttctgatgtagaagaacgcgaatttattgtcgtggatccgatgcttgctacgggaggctctgcggtggaagcgatcaacagcctgaaaaagcgcggcgcgagaaacattcgttttatgtgtcttgtagcggctccggaaggcgtggaagagctgcagaaacatcattctgacgttgatatttatatcgccgcccttgatgaaaaactgaatgaaaaaggctatatcgttccgggcctcggtgacgcgggtgacagactgtacggaaccaaataaatcggaaaacctcattcaggggttttcttttttttatccagattttagctgaatgggcagaggtcatacatttataggtgaatttgtgaacattctgtgtatgcttccggtataaaaagttttttaactttaaacagattgacacatgttaggggctattgtatgctaaacgagggtattatgagaaggttttcattcctttcatttctagtatccatcctcattttaaatcctccaaaaaaacccgttatatgaggatttatctaagcgaatgaaacagcatcccgtagcatcaggaggatgagtggttttttcgaacaggccgttttgcggacaaaaaaggccttctgcaagggttaaccgcatgttttgccgtatccaggaattatattacattttcatcaggagacagatagttgatggacgatcccaatcttacattcagcagacaacggagatatgtatttgtaatcttagcaatctatttgctgggatatggtcttacggcgtataaaactgtttttttaggcctctttttgggaactgttttcagtttgtttaatttgtggctcttgaccagaagaatgaatgcttttgacaaggccgtggcgaaaggaaagtccatacgatcactcgggagcgcagcgcgttggtgcaatgcgatacttgcgatggctgtcgcctttaaatatcccgataaagtcagtgtggcaagtgtgattattggattaatgacaatttatcccgtcattatgatagattccattattcagctcaaacgttcatcaatggaagagaggtgaaaacccattgaatcacgattacagaactattgatttgtttggtcttacttttaatctgacaaacattctgatgattactgtggcaagtgtgattgtgctgctgattgcgattcttactacaagaacgctgtccatccgtccgggaaaagcccagaacttcatggaatggattgttgattttgtccgcaatattataggcagtacaatggatttaaaaacaggggctaacttcttggcgcttggtgtaaccttgctgatgtacatatttgtatcaaatatgctagggctgccgttttctgtaacggtcggacacgagctttggtggaaatcaccgacggctgatccggctattactctgactctagccgttatggttgtgtcgttaacgcactattacggcgtgaagatgaaaggtttgaaggaatactctaaggattacctcagaccggttccgcttatgttcccgatgaagatcattgaggagtttgcgaatacgctgacactcggacttcgtctttacggtaacattttcgccggggaaattcttcttggcctgcttgcgaatctggcgacgaatttctactcaaacagtttctttctcggtttggtcggcacagtcggagccattattccgatgcttgcatggcaggcattcagcttgttcatcggtaccatccaggcatttatctttacgatgctgacgatggtgtacatgtcacacaaaatcagtcatgatcattaaaatcatatatccattcggataacattttaaaggaggaactttttcatgaatttaatagcagctgcaattgcaatcggtttaggtgcacttggtgcaggtattggtaacggtctgatcgtttcacgtacggtagagggaatcgcccgtcagccggaagcaggaaaagaacttagaactcttatgttcatgggtatcgcattggttgaggcccttccgattatcgctgtcgttatcgcgttcttagcgttctttggctaagcaaaaaagccttatatgaactaaaaatggcgaagatcactctaagagaaccttcgccattgctttatgtctgataagcaggccgtcccgaaacggctttttatcagcagagaaaacctgcagaagggagttgccgtagtagatgtctcaattacctcttgaattaggactgtcgtttaacggcggagatatcctattccaattgttagctatgttagttttattagcgcttctcaagaaattcgctctgggaccgctattaaatataatgaaacagcgtgaagatcatatcgccggcgaaattacgtccgctgaagaaagaaataaagaagcgcagaagctgattgaagagcagcgcgttcttttaaaagaagcgaaacaggaatcacaatcactcattgaaaatgcgaaaaaactgggtgaaaagcagaaggaagacattatccaggctgcacgcgccgagtctgaaagattgaaagaagcggcgagaaccgaaattgtcaaagaaaaagaacaagcggtttccgcacttcgcgagcaagtcgcatcactttctgtcttaatcgcatcgaaagtgattgaaaaagagcttgatgaacaagcccaggaacaactgattcaggactatcttaaagaggtaggagaaagccgatgagtggatctgctgtctctaaacgatacgcgtcagcgcttttcgacattgccgttgagacttctcaaatcaatgaaatcgaagaagagcttaccgtactaaaagaagtgttccgaaacgaagccggattacaggaagtgctaagccatccgaaggtatcggccgctaagaaaaaagagctgattcagcaatcgttcggcgcactgtctgagtctgtgctgcatacgatttttcttctgattgaccgccgccggtcttcgattgtgcctgatctcacagacgagtttatcaaacttgccaatcaggcccgtcagacagaggacgcggttgtttattcagtaaagccgctttcagaagcggaaatgttatcattgtctcaagtgtttgcaaaaaaagccggaatcgcttcgctcagaatcagaaatgaagtgcagacggatttaataggcggcattaaagtccgcattggaaaccggatttatgacggaagcgtaagcggaaagcttgagcgcatggaacgtcaacttgccggaggaaatcgatagaaggggtgaaacctaagtgagcatcaaagctgaagagattagcacgctgataaagcagcaaattcaaaattaccaatctgaaattgaagttcatgacgtaggtacagtcatccaagtcggagacggtattgcgcgtgtacacggccttgacaattgtatggccggtgaacttgttgagttttcaaacggcgttttgggtatggctcaaaaccttgaagaatccaacgtaggtatcgttatcttaggaccttacagagatatccgcgaaggtgatgaggtcaaaagaacgggccgcatcatggaagttcctgtaggtgaagaattaatcggacgtatcgtcaacccgctcggacagccggtagacggactgggtccgattctgacaagcaaaacacgtccgatcgaaagccaggctccaggcgtaatggaccgtaaatcggtacatgagccgctgcaaacgggtatcaaagcgatcgacgcgttaattccgatcggccgcggacagcgtgaactgattatcggggatcgtcagacaggtaaaacatctgttgcgattgatacaatcttaaaccaaaaagatcaagacatgatctgtgtgtacgtagcgatcggccaaaaagaatctacagtacgcggcgtggtggaaacacttcgtaagcacggcgcgcttgattacacgattgtcgtgacggcatccgcttcacagccggctccgcttctttaccttgcaccgtatgcaggggtgacaatgggtgaagaattcatgtacaacggcaagcacgttctcgtcgtatatgatgatttatccaaacaagcggccgcttaccgtgagctgtcattgcttcttcgccgtccgccgggccgtgaagcattccctggggatgtattctatcttcactcccgtctgcttgagcgcgcagccaagctgagtgacgctaaaggcgcaggatcaattacggcgctgccgttcgtcgaaacacaagcaggagatatctccgcttatatcccgacaaacgtcatttccattactgacggacagattttccttcaatccgatctattcttctcaggcgtgcgtcctgcgatcaatgccggattatccgtatcccgtgtcggcgggtcagcccaaatcaaagcgatgaaaaaggtagctggaacattgcgtcttgaccttgcttcataccgtgaacttgaagcattcgcccaattcggatctgatcttgaccaggcgactcaggcgaaattgaaccgcggtgcgcgtacagttgaagtgctgaagcaagacttgaataagccgcttccggttgaaaaacaggtagccattctttatgcgctgacaaaaggatatcttgatgatattccggttgcggatatcagacgttttgaagaagagtactacatgtaccttgatcaaaaccataaagatctgcttgacggcattgcgaaaacaggaaaccttcctgctgatgaagacttcaaagctgcaatcgaaggcttcaaacgcacatttgcaccaagcaactaacccttagaagatgagagaaaaaggttctctttttctctctttttacgcaaatgaagaataaaggtggtgaaatctttggcctcattacgcgatattaagtcaaggatcacgtcaacgaaaaaaacaagccagattacaaaagccatgcagatggtatccgctgcgaagctgaaccgtgcggaaaccaacgcgaagtcatttgctccgtatatggataagatccaggaggttgtgtttaacgtcggaaaaggcgcgaaaaacgcgaaacacccgatgcttgtctcaagagaagtgaaaaagacggcgtatctcgtcattacgtctgaccgcgggcttgcgggtgcgtttaacagttcggttttgcgaaacgcttaccgcaccattcaagaacgccatcagtctaaagatgaatacacggtgattgcaatcggcagagtcggccgcgatttcttcaaaaaacgggagatgccgattttgtctgagttagtggggcttggcgacgaggtcacttttgctcagattaaagatttgacccgtcagacggttcaaatgtttatcgacggcgcttttgatgaactgcatttggtgtataaccatttcgtcagtgcgatttcacaggaagtgacggagaaaaaagtgctgcctttaacggatttcggaacgagcggcgggaagcgcacggcttcttacgagttcgaaccggatgaagaagaggtgctcgaagtgctgcttcctcaatatgcggaaagcttaatttacggcgcgcttcttgacagtaaagcaagtgaacacgctgcgagaatgacagcaatgaaaaatgcgactgataatgcgaaagaactcattgattcactttcgctttcatataaccgcgcgcgtcaagcggcgattacacaagaaattaccgaaattgtcggcggtgcagccgctttagaatagaaagattttgtcaggagggatagcgatgaagaaaggacgcgtaagtcaggtgcttggaccggttgtcgacgtacgtttcgaggacggccacttgcctgcgatttataatgcgattaaagtttcacagccagctacaggcgaaaatgaagtaggcatcgacctaacgctagaggttgctcttcatttaggcgatgatacagtccgtacaattgccatggcatctacggacggaattcagcgcggaatggaagccgttgatacaggtgcgccgatttccgttccagtcggtgatgtgactctcggacgcgtatttaacgtactgggagataaaattgatttaaatgaaccgctgcctgcggatgctcaaaaggacccgatccacagatcagctccttcattcgatgagctttcaactgaggttgaaattcttgaaacggggattaaggttgttgacctgctcgctccttacatcaagggcggtaaaatcggattgttcggcggcgccggcgtaggtaaaaccgtattaatccaggaattaatcaacaacatcgcgcaagagcacggcggtatttccgtattcgccggtgtaggagagcgtactcgtgaagggaacgaccttttctacgaaatgagcgattcaggcgttatcaagaaaacagccatggtcttcggacagatgaacgagccgccgggcgcacgtatgcgtgtagcactgacgggtcttacaatggctgagcatttccgtgataaacaaggacaggacgtactgttctttatcgataacattttccgtttcacacaagcgggttcagaggtttccgcgcttctcggccgtatgccttctgcggttggttatcagccgacgcttgcgacagaaatgggtcagcttcaagagcgtattacgtctacaaacgttggttcagttacatctatccaggcgatctacgtgcctgccgatgactacactgacccggctccggcgacaacgttcgctcacttggatgcaacgactaaccttgagcgtaaattaactgaaatgggtatctaccctgcggttgatccgctggcttccacttcccgcgcgcttgctccggaaattgtcggagaagagcattatgcggtggcgcgtgaagttcagtcaacgcttcagcgttacaaagaacttcaggatattatcgcgattctcggtatggacgaattaggtgaagaagacaagcttgtcgttcaccgcgcacgccgtatccagttcttcctttctcaaaacttccacgtagctgagcagtttacgggacaaaagggttcttacgtgcctgttaaagaaacggtacgaggctttaaagaaatcctttccggtaaatatgaccatcttccggaagatgcattccgtcttgtgggacgcattgaagaagtcattgagaatgcaaaagagatgggtgtagaagtttaatctggtcctaggagggtaaaagcatgaagaccgttaaagtcaatatcgttactcccgacggcccagtatatgatgctgatattgaaatggtgagtgtaagagccgagagcggtgatctcggtatcctgcctggccatattccgaccgtggctccgcttaaaatcggcgctgtccgccttaaaaaagacgggcagaccgaattggcggctgtcagcggcggatttttagaagtccgtcctgatcaggtcactatccttgcacaagccgctgaaacagcggaaagcattgataaagagcgcgcccttgctgcgaaaaagcgggcggaagaccgtttgaacaaacgatcagatgatactgacattcgtcgggctgagcttgcgttacagcgggctgtaaacagattggatgttgcaggaaactaaaaaagaatccttctcggctgtctgagaaggattctttttctatattaacgcataagagattcatagacgccgataagcggatgatcctcttctttttgcagatataaatgttcgcagcagttgtcggtgtgccacgttttgtttcctctccgcacacccgtcgtataagcgccgtccgtatacggataaggtttgacgacccattcggcatcgtcatgatgtctgatggcgcaatcgatgacatacacactgagcattttctcaaattcgtcaatcggcaggttccaatccgccaaaagcagctcttttatgctgcggaagtaaagagcttccactgccagcaggctgccgggtgaataatcaagagaaatgttgaaaaactgacataattctttcagttcctctgtttgagactgtctataatcatagtagaatgctatcgcttcccactcgtggtcaaatacgggaagtgtttctccatactgcttttccggatgaaaaaaggaatgattcatattcccatctcctttccaaaaaagtatatcatgccggagaacggacatttaagcggggattgcccctaattttggataaaaattctgatgtaaaaatgatcatctttctctcttcttcttatataataagagaggatatgaggggcggaaaaaatgaaaggagatggaatttgtgaatgtattggggcagcaggccgcaatcagcatcctggttcacctggtatgcattgcggtgacatggtgggcgcttcaggccgtcaactttgatccgctgatccgaaaaggaaaaatagtgcaggcgaggctgctgatcattcttcttaccattgcgatcggtacggcagtcgccaacttctttttagattatcttacctattcgaaacagcttccatacttattttaagatgtttcgtctgttgaaatgaagggaatcgctgggtgagaaaccaatttttcttcacccgcttggcgagttttgacgaagttttccatgtattgctttccccggctccggcaaaaatgggagtaagggggagagatcgatatgaagaaaaaaagagcaggccgtatcatcttgttttttgtttttttaagcgccttaatagcggtatttcattccattcatgcaagtgagctgtctccgcttgcccagattgccgaaggaatggagcggcagcaggtcactgtggatgaatggacgcttcatgcgaaaaaaaatctgaacctgtcactgagtgaatttgatgacaaggtaaaagaactgaagacgcagtatccgcaatatcattgggaatccgcgcgggaagataaaatcgtaaaggccgtcggcacgtattctgacaaaaaaaatcacacaacttttaaactgcagctcgtcactaccctcaaaaaccagaacccaacttcgtatttattatatgagcaaatgagcccggagcaaccggaaaactggaatgatacatatgaacagtttgaacggcaggcacatgacatatttcaaaataaagtatttatttttacttgtctaaagggtcatttaaatgataatatgagtattgttttgcaaaaaaaagcagaacagctcatgaaagaatttgaagcaagtccagttgaacatgtagttgagcctcatttcgtttctgtttctgcatttacatataagtggacagattacatcatgacatcgaaacataagatgaatgtgcaagttgcgcttagaagtgcgggaatgggcggaaaacataccgttacggttggcacaccaatcgtgacaactgaatattaatatagagaatatagggacgcggaggggaataccttggaaaaaatcatcgtccgcggcggtcagaagttaaacggcacagtgaaagttgaaggagcaaaaaatgccgttttaccagttatcgctgcatctttattagcaagtgaagaaaaaagcgtaatatgtgatgtacctacgctctccgatgtatatacaattaatgaagtgttgcgtcatttaggagcagatgtgcattttgagaataatgaagttaccgtaaacgcttcttacgctttagaaacagaagcaccttttgaatatgtgcgcaaaatgcgcgcgtcagtgcttgttatgggccctctgttagctcgtacgggtcattcaagagtagcgcttccgggcggttgcgcaatcggctcaagaccgattgatcagcatttaaaaggctttgaagcaatgggtgcaaaaatcaaagtaggcaacggctttattgaagcagaagtggaaggccgtctgcagggcgcaaaaatctatttagatttcccaagtgtgggtgcgacagaaaacttgattatggcagctgctttagctgaaggaacaacaacgcttgaaaacgtggcaaaagagcctgaaatcgttgacttagcgaactatatcaatgcgatgggcggaaaaatccgcggagccggcacaggcaccattaaaattgaaggtgtcgagaagcttcgcggcgtaagacacaacatcattcctgaccgtattgaagcgggtactttcatggtggctgcggctatcacggaaggaaatgtattagtcaaaggtgcggttcctgagcatcttacgtctttaattgcgaaaatggaagaaatgggagtcaaaattacggatgaaggagaaggccttcgtgtcatcggtcctgcccagctgaagccgatcgacattaaaacgatgcctcacccaggattcccgactgatatgcagtcgcaaatgatggcgctgcttctccgtgcgagcggaacaagcatgattactgaaactgtgtttgaaaaccgttttatgcatgctgaagaattccgccggatgaatggcgacattaaaattgaaggacgttctgtgatcattaacggtcctgtacagctgcaaggcgcagaagttgccgctacggacctgcgtgcgggcgcggcgctgattcttgcgggattagtggctgaaggtcatacacgcgtcacggaactgaagcacttggatcgcggttatgtgaatttccataaaaaacttgcggctctcggcgctgacatcgagcgtgtcgttgatgaaacggccgctgaacaagaaagcaaagaagtcgtaactgacctaaacgcataatggctgtaaaaacagtatgtcaatctggcatactgtttttttatggtttatcatcattattatgctctgattttcaaaaaagaatacgtttttcgcgtgaaaaatggaataagattctgtccaaaaggaagtcatattagcttgtccctgcccataagatgaagtagagtcgaatcccaagcaggaggcagctgatatatgaaaccgattgtatttctactatccgggctgtgtatacttattcttcttgttcccaccattctcgttcttccgtttcaggcggaaaaaggagcagccgtaaacagagagcccggacacaaaacaacacacaccacacgagaaacaaaaggagcagaaacattgaaagaatcacctgtatccattccggtttatcggacatccaatcattctgtagagaacattccgcttgaagagtacgtgatcggtgtcgtggcttccgaaatgcccgcaacctttaaaccggaagccttaaaagcccaggcgctcgccgcccggacattcatcgtcagattgatggttgctgactcagccgttcaggcgccgaaaggatcactggtggacgatacgcaaatgttccaagtctatcaaagcaaaagccagctgaaaaaagaatggggttctaagtacgcacacaacctcaagaaaatcacaaacgcggtcgcaggcacgcaaggaaagattttaacgtacgacaacaagccgattgaggcatctttcttctctacgagcaacgggtatacggaaaatgcggaagcctattggacaagcgccattccttatttaaagagcgtgaaaagtccgtgggataagcaatcgccgaaatatcttgccacccagaccttcagtgtgccggagtttcagcaaaagctcggcgtacagctctcgggacaaaacacggtagggcagattacagccagaacgccgggccatcaagtggcgacggccgtcataaacggcaaaaagctgaagggaagagacatccgggaaaaactcggactccgttctgccgactttgaatggaaacggaacggcggcagcatcaccattacgacaaaaggattcggccacggcgtcggcatgagccagtacggggccaattacatggcggagcaggggaaatccgtggcggacatcgtcaagcattattatcagggagtggacatatccgaagcagattcatttttaaacaaatatatggcgaaaaaataggcgctttcatgagcgtctgttttttttgaaaactattccataaacggtaaagcaaccaacagactcatataacgaaagcctaaaggctgacaaatgccgtctgaaggctgagcgccgggtgaaaatcactgataaaaatgccgtatctatgtgaatatacgcaaaaataatgaggaacgccgtcctatttatttcccttttcatctcatttacgataaatattgttcggcgttgaacgtaaatctattgaaaaggggaagaagcaatgaaaaaaacactttcactcataatcatgctcggattgatgctgactgctgcatctcctgcttttgctgccgagaatgcaaacgagaagacatttttatttaaaaacaatatcgccattctgcttgatgcgagcggcagtatggcgaaacggattgacggcgtttctaaatacaatatggcaaaagatgaaatcgtccgttttgcagatcgaattaagtctacatcacaggtcagaatgacggttttcggttcggaaggcaataataaaaactccggaaaagttcaatcttgtgaatccattcgcggtgtatacggattccaaaagtttgacagacagagcttcctcaactctctgaacggaatcgggcctacgggctggacaccgattgcaaaagcattagaagatgcgaaggcttcttttaacggcgttcataaattcggctttaaatccgtttacctgttgacggacggtgaggagacatgcggcggagatcctattaagacagcgaaagaacttcgcaaacatcatattaaagtcaacgtgatcggctttgactttaaagaaggcttcaacggacagcttcacgcaattgccggtgcgggcggaggaaaatattacgaagctcacagccaaaaggatatgaaccgcatctttacgatggaagcgagttcattagcgaaataagaaaaggtgccgtttagcggcccttttttttatttttatttaacaaaaatttcaagaaaagatgaagagaaaactgtaaaaagaatcagattccggacttatattacaaaaagggcgaaaaaggcattaaatctgtcatcatttatccaatctttttaggatgatgcgcataattctgttcatttttaacggcgtacagccgcttatacaaaaggaatcccgccctatatctttttgcatactcctcatctagcatagagaagagccgggggcccatcggccaaaaacaaacggagaggaatgaaggaaatgaaaaaaatgttcactgcggggattgtcggacttttgacgctttcactcggatcacctgtttttgcagctgagaaaaagcacgaagaaacaaacgtcgccgtgctgtttgacgcaagcgggagcatgatacaaaaaacagggggagagcgtaaaatagatgttgcgaaagagtctgtcacttcttttgcggaagttcttcctgaagacacgaatctgatgcttcgggtattcgggcataagggcaataataaaaactcaggcaaagccgtatcatgtaacgcgacagaaacgttatacggccttcagccgtacgccgtgactccatttgagcaatcactcagcaagattaaaccgaccggctggacaccgatagcgaaagcgctttctgatacacgtgaagaatttgagcgggccggcgctaaagggaaaaacgtcgtatatctgatcacagacggtgaagaaacatgcggcgggaatcctcaagccgaaattcaaaagctccgtaaagcgaatgtcaacacggtcgtcaatatcatcggcttcaacttcggcatgaaaggaagcgaaagccttgaaaaagcggcggaagcgggaggcggcacatacgtctcagctgacagcgcggacgagttcaaacaggcttgggaagacgccgcaaaggatttagcaaaagaataggttaaaaaaggacgcccgtgcggcgtctttttttgtttagaaaacggaaccgcgggaatgatacggataaaaggagatgaacgctgttgttaaaaggagcaggcattatattggtgctggcggcagtcgtttttgttctgatagggatttttctgaagcttgccgccttcatattcgtcagtatattggccattatcgccgcagttattttattcaccattctgagcagacatcatcgcaatgaaacatagagtccgaagagggctctttttttaaaccgcaaattcgacaaaatacagggattgtggaagaataaaagagaaggatactgcggaggggaaaacagtggatgaaaaaacaacagcggtaagagacatataccgctatgaaaaaggggtattaacaaagacggcagatcggatggtttcagagtatccgcttaccgtcatggtgaacgggcaggaatttgttacgctcgtctgcacgcctgaccatttagaggaactcgtcatcggatttctcgcatcagaaggcgtcattcgttttgaaaaagagatcaaaagctttactatagatgaaagtctcgggttcgcatatgttgaactgacgaatcccggagtgcttgagcaaaaagactatacgaagagggtcatcggttcatgctgcgggaaaggccgccatttttactttcagcaggatgtgaaaacggccaaaaccgccgtcagccggattaccataactcctgagacgtgccttcgcctgatgaaggagatgcaaagcggaagcggcaccttccgggaaacgggcggcgtccataatgcagcgctgtgcgatacggaaaagctgctcttgatgaggacggatatcgggcgccacaacgcgctggataagctgtacggctgctgtttgaaaaacggaatgcccgtccgtgacaagctgatcgtcttcagcggccggatttcctcagaggttttattaaaagccgcaaaaatcggcgtgtcgattgtcatttcaaaatcggcgccgacggagctcgcgctgcaaatggcggaagagctgaacatcaccgcgatcggttttgtcagaaacggatcatttaacgtatacacacatcctgaacgggttgaacaatagaaaggggtcttgggcttatgaatacagaaacgcgccgggtgacagacaaaaaggaaaggccgctcagggatcttcgtatctctgtaaccgaccgctgcaacttcagatgcacgtactgtatgccagccgaattattcggaccggattatccatttttacaaaagacggaattgctctccttcgaggagcttgagcggcttgcgaagctgtttgtcggccgcttcggcgttgaaaaaatcaggctgacgggcggagagccgctcatgagaaaagatatgcctgaattgatcaaaaaacttgcgcgcatcccaggacttaaagatatcgcgatgacgacaaacggctctctgcttcccgtgtatgcggaaaaactgaagcaggcggggctgcatcgagtgacagtcagcctcgattctttagaggatgagcggtttaaggccattaacggccgcggcgtttcggtgaacaaggtgcttgagggcattgaggcggcaaaagcggccggactcggtgtgaaaatcaatatggttgttcaaaagggcgtcaatgaaaaagatatcctgccgatggcccgctattttaaagaaaaaggtcatattctccggtttattgaatttatggatgtaggcaatacgaatcaatggaataaaaaagacgtgatcacgaaggccgaaattattgatctgatcaaccagcacatgccgacggagccgatagaagcgaattacaaaggagaggtcgcttccaggttccgctatcttgacggttccggcgaaatcggcgtgatttcctccgtctcggatgcattctgcgcctcctgcaacagagcgcgcctgtcggcgagaggcgagctgtttacgtgcctgtttgcgtcaagcggctatgatgttcggaaactcgtgcgcggcggtctgaccgatgatgaattgacggaatccatcgcttctgtctggagaaatcgcgcggatcagtattcaattgaccgcgcgctttctaaaacggatgggaaaaagaaagtggaaatgtcttatataggcggatgaagaaaagcttgcccggacaagggcaggcttttttattcacaatatgagagcggtctgttcaaaaaataccggtaacagccgaaatatatgataggaattttgatgcaggacaatcaagttatgcaattccaaagccatacaatatgttaaaatataaccaatagaaattagaaaaggttgtgaaaggggcatgaccgcatacgagattccgtcatctcaagttggagtcaagatcaacaaatggtacaagcacattttagcgtttcaagcggctgatgccataaagctgaaagaggaaattgatgaggatatacaacgtatggaggaagaccagctgctgctgttatattatcagctgatcagctaccgccatcatattatgcttgattacgtcaagccggaatgcaccgaacaatcacagattcagtacagcgagctgcaaaagacgatcgaaagcacggacagcatatcgggactgtctgagtattatttccatttgttcagagggatgtatgaattcgatcacaataactatgttgcggctatttctttttaccggaaagcggaaaaactcctttcatttgtcgaggatgatatagagagggcggaattccatttcaagatgtctgaagttttttacgtcatgaagcagactcatttttccatgaatcacgggattcaggcgctggatacgtatatgaaacacgatttttacagagtgcggagaattcaatgccatttcgtcatttcaggaaactacatcgactgcaaaaactacgacaaagcgcttgagcatttagacgaagccctccgcctttctttgcttgaaggacagccccgcctgatcgggtcttcgctttacaatctggggaattgttatgctgaaaagcgggatctggatgaagcggcccggtactttagaaaagcggttcccgtttttgaagagcatcagcttgaacagcttccgaaggcgctgttcagcttaacgcacacccttttcaggctgcatgatgaccaagcggcccttacctattatgaaagagggatcatgatcgcgaaagaacgcggcgaccgattcagtttagagaagtataagtttttacaagcgctttatttggagtcactcaatatggatttaatccatgaagtgtttgactatatgaatgaaaaatcgctgtatgtgtatattgaagatttcgccttggaggccgccgtttacacaagcgcacatgagcaatataaagaagcggcgtatttttatgaaaaagcgattcgcatgagagaaaaaattcaaaaagaacagtgtttatacgatatataatttttgttaaccatctgatcagcagatggttatttttttatgcacatcaggacgtttgatcatagaaaaaatcggaaaaatcgcaaaagagggaaaaaagtacgatgggaaggagggatttgttgttcggatttaatgatatgataaagtttttcgtttcatttctcatcattctcccgatggtgtctgtcatccatgtgtcgggacacagctttatggccatgctgttcggaggcaaggcgtcgttggatatcggaatggggaaacgtcttttaaaagtagggccgattcaggttcggcgtatctacttcatagattctttctgcaagttcggcgaattgcggatagataaccgtctgacgagcgcgctcgtctattccggaggctgtctgtttaatctcgcttctatctttttaataaatctgctgatcataaaagatttcctagagccaaacttatttttttaccaatttgtctatttttcaacttattatgttttctttgctcttctgcccgtgcaatacggggataataagctgtcagacggattggccgtttacaaagtgatccgctacggggaacgctgtgaaatcaataattgagagttgaaatgtttgctatcaggctgaaagggaagaaaacaagtacacaaaaacaaaaggagctgaagagatcatgagtgaagataacggtttaaaagacaaagtaaaaggcggcatgaacaaaataaaaggggaagcaaaggacaaagcaggcgacatggcaaacaagtccgacttaaaagcggaagggaaaaaagacaaagcgaaaggcagcctgcaaaagggtgtcggtaaaacgaaagataaactcagtgatgattaatttgatcgtgaaacacagcaaaagcccaaaatattttgggctttttgttatgagaaatgacaaaaattccagttcgtttggttaatattcactaaatttttaaatattctataaattccccggcgatttctttataatattcacaaagaatgtaacctttcttcacatttaattaaacgtttgttgaagaaaaaaatgagaaatcggtcatttctgcaaaaggaatcgggccgttcactgtcgaataacttttatcacttaacatttcatgaggtgaagggggtgacggccgcctgcatcgtttcggtatgaccatgcggattgtgtttgactatcactaagggggaatacagatgaaactgacaccggttgaacaagaaaaattgcttatttttacggcgggagagctcgctaagcagcggaaggcgcgcggcgttctgctgaattatcccgaagccgccgcatatttgacctgttatctgatggaaggcgcgagagacggaaaaagcgttgctgagctgatggaatccggccgcaatgtattgacggaaaaagacgttatggaaggcgttgcggaaatgctggacagcattcaggtggaagcgacgttcccggacggggttaagcttgtcaccgttcatcagccgatcaaagcggaggtgaagtcatgaagccgggagcgattcaagtcgcaaaggggaccatcaccattaacgaaggccggaagacgctggaggtgtcagtcaccaataacggaacacggtcagtgcaggtcggatcgcattttcattttgccgaagccaacggcgccctttccttcaatcgggacaaagccatcggcatgcgccttgatatcccgtcaggcacatctgtccgttttgaaccgggagaagagaaaaccgtcacgctcgtggaaatcggagggcgaaaaacggtcagaggcctcaacggcatggccgatacgtatatggatgagcggggaaaagagaagacgctgtcaaatcttaaaaaagccggatggatggaggaggcgatccgatgaaaatgtcacgtgagcaatacgcagaactgttcggaccgacaacgggagacaaagtcagactcggagatacggatttatggattgaagtcgaaaaagatttcacgaattacggggaagaaatgattttcggcggagggaaaacaatccgggacggcatggggcagaacgggcgtatcaccgggaaagacggagcgcttgatctggtcattacaaacgccgtcatcctggattataccggaatcgtcaaggcggatatcggggtgaaggacggccggattgtcggcgtcgggaaaagcggcaaccctgatatgatggatggggtggacccgcacatgattatcggtgccggaacagaagtcatttccggcgaagggaaaatcgtaacggccggcggggtggatacgcatatccactttatctgcccgcagcagatggaagtcgcgctttcttcaggcgtgactacgcttctcggcggcggaacaggtcctgcgacgggaagtaaagcgacgacttgtacatccggtgtatggtacatgtcgagaatgctggaagcggccgaggagtttccgatcaatgtcggtttcttaggaaaaggaaatgcatccgataaagcgccgctgatcgagcaggtggaagcaggcgcaatcggcctgaagctgcatgaagattggggatcaacgccaagcgccattaaagcttgcatggaagcagcggatgaggcggacattcaggtggcgatccacacagacacgataaatgaagcgggctttttagaaaatacgcttgatgcgatcggcgaccgggttatccatacatatcacatagagggagccggcggaggccatgcaccggatattatgaaactcgcatcttacgccaatatcctgccgtcctctacgacgccgacgattccatataccgtcaacacgatggacgagcatcttgatatgatgatggtctgccatcatttagattcaaaagtgcctgaagacgtggcgttcagtcattcacgcatcagagcggccaccattgcggcggaggatattctgcacgatatcggcgcgatcagcatgacgtcatctgactcgcaggcgatgggcagggtgggagaagtgattatccggacatggcaggtggccgataaaatgaaaaaacagcgcggcgctctatcgggagaaaacagcaatgacaatgtgcgcgccaaacgctatatcgccaaatacacgatcaacccggctgtcactcacggtctgagccatgaagtcggttccgttgaaaaaggaaagctcgccgacctcgtactatgggacccggttttcttcggcgtcaaacctgaacttgtgctcaaaggcggcatgattgcccgcgcccagatgggagatccgaatgcttccattccgacgcctgagcccgtgtttatgcggcagatgtacgcatcatacggtaaagcaaaccgcaatacctctattacatttatgtcccaggccggtatcgcaaacggtgtgccggaaaagctcggccttgaaaaaatgatttctcccgtacggaatatccgtaagctgagtaagctcgacatgaagctgaatgacgcgatgccgaatatacatgtcgatccgaaaacctatcaggtgttcgccgacggagaagagctggcatgccagcccgtcagctatgttccgctaggacagcgttatttcttattttaatccctctccggccggtttcccgccggcctgtttaccctctattgccaacttgatttcatcctgccgcccgttttagtgtatattagtagttgacaaacaaatgaaatgtaactattttggttacaatggtggtgaaaaacatgattaacagccgtcttgctgtggccattcacattttatcgctgatctcaacggatgaacgggcgtcatcggacatgattgcgggcagcgtaaacaccaatcccgtcgtagtgcggagaacgatcagccagctgaaaaaagcgggtattctgacatcccgggcgggtgttccgggagccagcctgaaaaaagatccgtcggagatcaccctcttagaggtttacagggcggtgcagaataaggaagagctttttgcggttcacgacaatccgaatcccgactgtccggtcggcaaaaatattcagcgcgcgctcgatgagacgttcggaagcgtacagcgggcaatggagaatgaacttgcgagcaagtccctttatgatgtaatgaatcatctcttttgttaaaaagagatgggttcatgccgctagacgtgtaacggaaatggttacaatgggtaatgaggaaatcacggttttggctccatattcagacaagcctggatgcgggattgcgatctgtttaatgaagaaaacctccgaaactaaaggaggtggtaaccgggatatttttattttgcttaaggcttatgtgaaggtgtctgttgtaagcgggttaccaaaaaaagacggaactcttattttaatacgcgctaaaaaaactgatggagaatatcctgcctccggtaatgccaaaaccgttcgcctcttcacaatcattataaaatttctcaaggaacgatcagcagcccgttagctgcccctcattagagatgagctgttaccacactgttacattagaacttccgctgcttttatatccttctgtcgctaagacttgataagcccaattactgcccagattcattccatggctcttccatgcgttaacatgattgctgaaagtgattgcagcgttgcttccggtcggtctcttcgactggcggacactccagtactgcgtaaaagtagtgttatcgccatcaatggaaggtgcgttataacgtgtcgttgtatatatgtcatatgtacctccatcactctttacggtacctttatacgttccggtaggtctgtaagtaccccatgaatccaccacataatattcgatgaggggcgatctcgtccagccatataaagtcaaatatccattgccgttcggcgcccaaacaccggcattatagtttattgttctaaatggcgagcctgtagtccagcctttaccaacaacgaaattcccggtattagaccaattaacactgtaatttccgccagagccattgactgcgtttactgttccgcccccgtcagtccaattttgccagtaatctgtgccagctgcagaggcggttgccgaaaacatgctgatactcatgaaagctgccgttaatcccactaagaatttctttttaaacttaaacatatgttacctcctatactattttttctgactttgacatgaggcagcactcgtaaatatttaacgaacgccaacgcttttgatcgttcctttcaatataatagcatgaatacatgggtgaatattaagaacaattgtaatttaattacaaagacccaaaaaattgtatgatgagtggtcttgtaccgccatagccttatttcgcagaactcagtgatttcagttaaaactctgaggaaacgttttatttgaaaaaacttttttgccgaaagaatatctgcatacagcgtcaatgctgttcgccgtattggcaaatccgaagcagaaaaactttaccgttgtcggagaagcggaataagaaaaaatcccgggcggatgcgccgggattttcctttttaatatgtattggcatcaatattattaaacgcgtcgtccacgatgccgagcgtcatgaggacaatgaaaagaacgataccgagaacggacaagccgaccgtcacgatcagatagatcccctgcattttcacgaactttgcataattctccagcatatgttcctctgtcagttcattgaactgcgccgccatctgtcccgcttcatttgccgagcgcatcagaaaaatgccggcaatgatctgcagaacgccgggaatggctccgattaaaaagaaaaacgcgcccgaaagcgccgcaaacgcgcctataataataaacaaaatacctgtcgcttttccccatttcgaaatagaaataagcgaacgattcactgattcaggtttcaaaccatggcactcctttacaaaaaaatactcacttttcatttatacactattcggtcattcttttgaatataaaatgtgttttttcaagctgtgtccgtttttatatcagaaaattcccgagaaacatcccgggaattacaaaatcggcgacagaagccttgaaatcgattctttaatgcggatccgcagcgaacgctcctgatattcttcatacgtatattttctggagacgagcagatcttctttaaatgaggaaatgagttttttcgcgatggtgacgtcataaataaaggcgttgacttcaaaattaagtctgaagcttctgacgtcgatattcgccgtaccgactgaagccgtctcatcatcgacgacaatcgtttttgcatgaataaagccgttatcgtaaatgtagactgaggctccggctttcaaaagatcgccgatgtaagataaagtcgcccagtaaacgaaagcgtgatccggcttgttcggaatcatgattttgacgtcaatgcctgacagacaggcgatcctgagggcatccaaaagacttgagtcaggaataaagtaaggcgtctgaatcaggatcgaccgtttggccgttgagatcatcttgatatagccgtttttaatttgttcccattctgaatccggtccgctcgtgacaatctgcatcccgacattgcccttcggctcgcattccggaaaatgattcggaacgtaagtgagcgtatggtgatgggaagcttggttccaatcgagaataaaccgtgtctgaatggcgtgtaccgccgtgccttgaagtctgaggtgcgtatcgcgccagtagccgaatttcggattcaggccgagatattcatctccgacgttaaagccgccgacatagccggtttcgccgtcaatgatgacgagcttgcggtgattccgataattgagccgcaaattaatcggacgaagcctggaaggaaaaaagacttccacatggccgccggcgtcccgcagcggtttgaagaatttttttctgagtgatcttgaaccgagttcatcatataacactctgacctttacgccttcccgtgcttttttcactaaggcatcgcgcaatttttttcccagttcatcacctttataaatatagtattgaaggtgaatgtgatcttttgcgttggaaatgtccttcattaagcgtttgaacttatcgcgcccgtccgttaaaatctccaccgaattatcctctgtaaagactgcgtggttgttcatgacaagcatatagatgaggtctttattatccacagtcgccctgttgttaaattggaattgcctcgacttcagatctttcagctgaaacttcagcagcttttctattccgatttttttacggtcttcccattgaaacaggtgcttgcgtctcaggttatggccgaataacaggtataaaataaaccctaaaatgggaataaaaaaaagaaccaagagccaagcccatgaagcgctggcatcgcgtctttctttgaaaatcatgatgacggccaaaagtatatttaaaacgaaaaaaaatccgaataaaataaatgaaatgctcactttgcaaccccgctatatcatatttatcaagactgtgcccattagtattccgacaagtgcagcaatctgattcccatttcaaattataacattgacattttgaaagaataaagagccggaatcaaagatgaatgcagttttctttcaaagaaagttccgggtgcggtaaaatatgcatatatgaaaaagaagacaaaaatgacagcaaaggggagagggcatgaagctggagcatgcggaacaattgccgggattcataaaaaaagaaattcagaaaatacaaatcgccatcgcgccgctgatgaaaaaaagcatcatttaccgttttcttgctttcccgctcgccgcttttagtctgtttcatctggcatcgcttttgattcaggccccttccgggagaggagctctcgtatcggccggcatttttgccctccttgcggctctgggtcttgcgttttttaaggaagccggctatcagcggaaacaggtgcaaaaaacgatccggctttatatgctgaacagaatcagaaaaagcgatattctgtccgaggaacggaaaagcgcctacacccggctgattgccgaggagccgtctgcgatgaagagctttattgaatttttaacggaagaagaccggaaaaaagaaatgctgtattaaaaaagagctgacgcgcgatcagctctttttgtcattcaaacacaggatcgttctcatagtaatatgaatcaggcgtgtcatacgtatcagtgctgtaataagccataattccgatgacagcgaagatgacgactaaaataaaagcgagaatgcccagtaccacactggatgccgcgtaaaaaaactgcattttgataaatgacgcataatgtgcaagcatattttcttccgcgttttcttctagcccttcctgaagggcggcagccgcttttgccgagcgcatcagcatgacgccggaaatgatgagcagaacacccggaatggctccgagcagcgtcacaatggctgacagagcggaaagagaacctgtgatgatcagaaacacggcggtgatctttccccatttggcgatgtcggcaagggaacgggcttttttattgagcggctggttttcgtctttgtctttatcgatggtgatcatgacagttctctccctaaaatgttcaagtcatatcgttttccgtccatttcggcgatacccgggaatacgccccattcggtaaaaccgaatttttcaaacagcttaatgctcggcacattatgtccgaagataaaagccatcaggctgcggatgccgattgccggagcgagtgccagggcttctttcagcagaaagcttcctgctcctttgccgcggcaatcctgatgcagatagatgctgatctccgccgttttgtcataggccggacggccgtaaaacgtttcaaagctgatccaggccgccactttgccggtttcatcttccgcgaccatcagcgggcgccggtccgtgtgccgcaaaaaccaatccatctggtctgcgggcgtcacttcttccgtatcagccgttaccattcgtgaggcaatcgtcgagttgtatatggccaccaccgcatctaaatcctccaatacggctttgcgcagggttaaattcatattccgggatctcccttcacatttcattacataattaagtgcaatctgcacatactacttctaaaaaagttttttatggatgtgtatatattttcagaaaagtgttcagaatgttgctgaggtgatgaacaaatgagagaggaagaaaagaaaacttctcaagtcaaaaaacttcagcggttttttcgcaaacgctggatattccctgcaatctacttagtcagtgcggccgtcattttaacagctgtcctttggtatcaatccgtttcgaatgatgtgaaggacaatctgacgaacaacggcggaaactccgcgtatgacagcggcaaagacgatgccgtcgaagtaggcaagtcaatggaaaacgtcgcaatgccggctgctcattctgaaaatgtttctgttgtgaaaaagttttacgaatctgatgccgcaaaaaaagagaaagaagcagcacttgttaactataataacacgtacagcctcagtaaaggaattgacttagctgagaaagacggaaaatcatttgatgtttctgcttctctgagcggtacggttgttaaagctgctaaagacccggtactggggtatgtggttgaaattgaacactcagacggcctgtctactgtctatcagtctttatctgaagtcagcgtggaccagggcgacaaagtaaagcagaaccaggtcatcggtaaatccggaaaaaatctttacagtgaagaaagcggaaatcacgtgcactttgaaatccgcaaggacggcgtagcgatgaacccgctcaattttatggacaagccggtaacatctattgaaaaagcggcggctgaagagaaaaacgctgtgacagaagaaacggaagggtcaattcagcagtcttccgagaaaaaagatgtgacgcctaaaaaagaaaccgaagaaaaaccaggtgacaaagaagacggcacaaaagacaagacagatggtaaagatgacggctcaatgaaagattcgggcaagtaatcttgatcccaaagcgtctatcagctctgataggcgcttttcatattgctgcatgtgcctttatactaatagaaaacgaaggagatgctgaatgaataaatgtctggcggccgggtggctcgtctttgttttcgtttctgctttgactgaaagctttcacgatatgattgtgtcgcagacggtgtccttccgtttcacgtcccatccggatgtgtccggtttctttgtgttcgatatggcggagctcgccataccggaagcggcgattcaaaagctcgggcacgcgttttcattttttgtgctcgcctatttgtttttcagggagcgcaggcgcatgaagagggcggtgctgtatgcattggccgccgctttcctgacagaaatcgtccagctctttttcggcagaaacggatgcctccgcgatgtgctgattgacagtctcggcattgccgcattctgggctttacaaaggaaaaagcatacagccaaacatacaaaaaccggcagtctgtgacagacgccggctttttttatatattatggtttgtcgatttgcttttatgaacgatactttcatagattcgcacgatcagatcgacaatcggacgaagcacatttgaaaatctgaacagcaggaatccgacaatgagggaaacgataatgcttccgagcacatcgatcggataatgatggccgacccaaattcttgagaagccggtcaaaaggccgaaaatcacaagcggccagccgagttttttgttgcggaacagaatcgcaattgaaatcgccaaagcgcctgtcgtatggtcactcgggaatgaagcatccgcggcatgagggatcagcgtatgaaccgtatgctcgacaaaggggcgcggctcgacatagactttcgtgatgaggtagttgatgataagcgccgcaacacccgtgaagcccgcgtacagggcgttttgtctgccttttgtgcttccgaacagccacatggcaagcaggaaaagggcgtaggcgtaaatggcgtattccgttataaaaaccatgatagagtcgagaatggcactatggtgcgacaaaccattgatcgctttaaatagttcgtaattcacaaatatcaccttttatctttattttatatgaacagtgtaatgcttttttctatgagacacaattggtattaaaaataatcataaaaaagtaaacagaatgaaacgtgactgtattactgtgcgtcaagtatgcgggaaaagaatagccgaaggagttttgtccgttgctgaaacgtttgaaaaacgccgatctgccgcttgtgtttgtcattatgctgctttgcggattcggcttgttaatggtgtacagcgccagtgatgtgatggggtctcagcggtacggagatccatcctatttcttccataaacaaagtgcctctttactgatcggattatgcttatttctatttgccgcctgtctgccgtataagcggtatgcgcggcttgtaccgctgtttgtggtcggttcgctggtattgctgctgctcgtattgataccgggaatcgggctggagcggaatttttcccgcaggtggctgggagcgggcccgcttgtcgtacagccgtctgaattggcgaagatcgccatgattttgtatttcgcttcggtttatacgaaaaagcagccgtacattcatcaatttgtgaaaggggttctgccgcctttagtaattttggggaccgcttttctgctcactttggcggagcctgatttagggacggcttccttaatcctggcggcgtgcgggtcgattttattatgtgccggcttgaaaaagcgccatcttttcgtgctcggcgcgacggcggtgtcgggggttgtttatctcgcattttctgcatcctatcgtgtgaagcgcctcgtttcctttaccaatccgtttggtgacgcgaacggggacggctatcagctgattcaatcctattttgctatttccggaggcgggtttttcggaagagggcttggaaacagtgttgaaaaaatgaactatctgcctgaggcgcataccgatttcattatggccgtgatcagtgaagagctggggatattcggtgttctgatcgttttgggattatattttgcgttaatgcttctcggcgtaaaaacggccgtgcgggctgatgacccgttcgggaagcttcttgccatcggaattacgtttcaattaatgtttcaggttgtcttgaatttgggagcgatgagcggactcctcccggttacgggtgtgccgcttccgtttatcagctatggcggttcttcattgattatgacgctgtttttgtgcggcatactggtcaatatcagtacatatgcgaaaaaacaaaccgtacggcataagcgtcctgccccgcatgaaaaaaaggcttcttctttttaatgaagcccgaaaaaaacgcccgggacatgctgtctccgggcgttctgtctgtttataaagctcctggtccttcttctccggtgcggatattaatcgtgtttccgatttcatagacgaatattttgccgtcgccgggctctcccgttttcagcacttttttcgccgtttccaccacttgatcaacggggaccttgctgacaacgatttccactttcagccgttcatatacattgctttcaattttgactccgcggtacagttcggtgtgagctttttgaaggccgcagccgtgtacgttggagaaggtcagcgatgtgactccgattttaccgagttcctgtttcaatgtttcaaacttagccggacgcgtaacgatttctaccttgaacatttgaccgctcatctaagccactcctcactttataagtcctgatatgctttttccccgtgcatcgttaaatcaagcccaagtgactcttcttcttcgctggcgcggaggggaatgaacagacctacaattttaatgataacgaaagtgacaataaatacaaatacataggttgccgcaatggccgcaatctgcttccagagcagtcccggatcgccgtaaaacagtccgtttgccccgccgtcattgacggaagtggtggcgaataaaccggtcgcgatgccgccccatgtcccgccgattccatgcaggccgaaagcgtcaagcgcatcatcgtatccgaaagtctttttgagccaatacacgccccagaagcagacaagcccgccgatgaaaccgattacgatggaagagaacggcgtaacgaacccggcagccggcgtaatggcgacaagcccggcaatagcgcctgatacagcacccagcatggtcggttttttgttcagcatccattcgattaaaatccagccgataattccggccgcagccgcggtgtttgtgttaatgagggcaaacatcgcgatactgtcaagcgtgagggcgctgccgacattgaagccgaaccatccgaaccaaatgagcgccccgcccaagaacgtgtaaattaagttgtgaggcgaagccgccgtgccgtccttgcgtttcccgagcacaatcgccagcacgagcccggcgaccccggaagaaatgtggacgacgtttccgcctgcgaagtcaagagcgcccatttggccgatccagccgccgccccatacccagtgcgcaacgggcgtatatacgagggaagcccacaaaaaggaaaatacaagaaaagcactgaatctcatgcgttcagcaaatgctccggaaataatggccgtcgtcagtacggcaaacgtcatttggaacatcatgaataatgaatgcgggatcgtatcactataacttccgggttcaaagccgacccccttcagtccggcccattcaatcccgccaagccatgtattcccgggggcaaaagcaagtgaatatccgtacaaaacccaaacgacggatacgatggcgagggaagaaaaactgtgcatcgccgtgctgagcacgtttttgctttttaccattccgccgtaaaacaaagccagcccggggtcatcagccacacgagtaaagcgcaaaagaacataaatactgtatcgcccatctgcatgttgtattcctccgtctcattcaaaatgtaatcgtgattaattcattattatagagaaaaaagaacgataaaacattttcgtgtaaggttatctgacatgtttttttgcgttcataatgtcgctttttcaaaggggtgtcatgcgactttatatccataaaaagagcgctggagcatggcggaagaaatcctgtccgggaaagagtaaaataaacggggtgagaaacactaactgcatcaggaggaattattatgacaacatcattgaatctgcaatttgaaaaaacggctttggtccttattgatttacaaaaaggcattgtgccgatggataaaagcggtaccgttgtgccgaacgcgaaaaaattaattgatgtgttccgggaaaaaggcggatttatcagctttgtgaacgtagattttcatgacggagcggatgcgctgaagccgctgacggatgaagaggcggcgggccattcggctccgccggcggattgggctgaatttgtgcctgaaatcggagtgaaagaaaacgattatacggtaacaaaacggcagtggggcgcgtttttcggcacggacctggaccttcagctcagaagacggggaatcgacacgattgtgttatgcgggattgcgacaaacatcggtgtggaaagcacggcgcgggaagcttttcagctcgggtatcagcaagttttcgtaactgacgcgatggcgacattcagcgatgaacagcacgaagcgacactcaaatttatcttcccgaaaatcggcagaagccggacgacggaagaatttatcgcacagacaaaatgacaatctccaaaaaaagccgcgtcctgttcttgacggccgtggcttcggggacgatgctgaacccattgaactcgtcgatgatttctcttgcgcttcacagtattcagcatgaatttcacctgtcgtttacaacggtgtcctggctgatatcgtccttttatcttgccagcgcggtggcgcagcctgttaccgggaagctcggtgatatgctcggcaggaagaagctgtttttgatcgggcttctgcttgttgccgtctcggcggtcggcgcgccgtttgcgccgacttttatgacattgctgatcatgcggctttttcaatcgatcggaagcagcgcgatatatccgtccggcgtcggattgatccgttcaaatatacaggagaagcaggcttcggcgctggccgtcctgtcaatctttgcatcagccatgacggcgctcggtccgactctcggcggttttctgatcgtttggggagggtggccggcgatctttttcgtcaatctgccgtttatcatcctcagtttttttctcggaatgtatatgtttccgaaagatgaaaaacgcgagatcggcggcttgaaaggcgtgctccgccagcttgatacaatcgggatactcctgtttgccggagcgattatccttctcctgtcgtttttattgtccttcagtacgaagcctcactatacagaaggcgtattcgggcttttatttgtcgggctgtttatctggcgtgagctgaaaacagagaagccgtttattgatgtcaggctgtttaaaacgcatcggaaactatcgtcggtgtatattcaatttattttgctgaatatattcttttactgcatctttttcgggcttccgagctattttcaggatgaaatgcatttgtccgttcagacaagcggattgattatgctgtttatgtcgggcatgagtattctggtgtcgcctttgaccggaaaatggatagataagaaagggcttcttcagccgattgttgccggaacctgcctgaccgcgatcggagcggtgctgttaacgtttttcttccttcaggcgcccatgataggaaaagggctgatcctgtccgtgctgggtgtcggctacggtttcggaaatgtcacgtttcaggcggccatgctgaaaacgagccccgccgacatggtcggaacaacgtccggcctgtttcagacctgcaggtatctcggttcgattttgtcttctgtcattttgggcattcttttcggaaaagaaattaccgccggccattttcatatgctcggcacgattcttatcgttgtcggcgccgtaagccttttgatggcgttccggttttcggttctcctcaaaaaagcctcttaacaggcgcaaaaaaaagagacgggctctccccgtctctttttttgtgtaatgtgctcaaaaatcaaaacgattattgtcgacagcgaccaatgttatttgcggaattttcagttatattttttcacatgtgatgtaaggaaaacgtacatgcaggagggagaaaatgacaaaaataacgagtgatcggctaagcaacaaagatttactgcctttagaagacggcgaacggacatggaaggcggtgaattttgcatccatctggatgggttgtattcataatatcccgacctacgcgactgtgggcgggctcattgcgatcggcctttctccgtggcaggtgctcgccattatcgtgacggcgtcactgattttgttcgccgctttggccttgaacggccatgccggaacgaaatacggcctgccttttccggtcattatcagggcttcttacggaatatacggagctaacattccggcgcttctcagggcatttacagccatcatgtggctcggaattcaaacatttgccgggagcactgccttacacattctgcttttgaacatatggccgggctgggggagtctcggcggagattggaatatattcgggcttcatctgccgggctttctgtcgttcattttcttttggggcattcatctgcttgtgctgcggcacggcatggaatcgatcaaaaaatttgaagtgtgggcgggcccgcttgtttatctcgtcttcggcggcatggtctggtgggcgatagatattgccggcgggctcggtccgatttactcacagccgggaaagttccatacattttctgaaacgttttggccgtttgccgccggagtgacgggcattatcggaatatgggcgacgctgattctgaatatccctgacttcacccggttcgccgcgtcgcaaaaagaacagattcgcggccagttttacgggctgccgggaacgtttgcgctgtttgcgtttgcaagcatcacggtgacatccggatcacaggtagcattcggagaaccgatctgggatgtggtggagattttggcccggtttgataatcctttcgttatcgctctttcggtcatcacactttgcatcgccgccgtctcggttaacgtggcggcaaacatcgtgtcaccggcctatgacttggcgaatgtcctgccgaagtatattacattcagaaggggagggtatttgaccgccgttttggctctgttcacaataccgtggaagctgatggagagcgccacgaatgtatatgcgtttctcggactcatcggcgggatgctcggaccggtggccggggtgatgatggctgattattttatcatcagaaaaaggcagctctcagttgaagacctttattcagaaaccggacagtacacttattacaaaggctataattaccgggcctttgccgcgacgtttctcggcgcgtttatttctttaatcgggatgtacgtcccggcgttcgccggcatctatgatatctcctggtttgcgggtgtcattttgtcatgtctcggttatacggcgcttatgtacattcatcctccttatgcaaaagcggagggacgaatcgtgcgggaaagagcggccgaataaaaaaagccgggggctgcccccggctttttgtcatatcagtctgcgattgaaacgtttccgtccgcttcaagcggcgttctttttttctggctccagccatacaggagcaaagcaatcaggacgaacagccccgctgccagataaatcgaatggaatccggccgaagcgacgaagaggccgaatacatatgacccgccggcaatcccgctgtcaaagaaagtgaagaaggtcgccgtcgcaaagcctgaacggtgtccgggcgaattctgaatcgccagcgtctgcatacacggtacgatagagccgtatccgagaccgattacggcaccggacaagagaagcatgagggcgctgtttgtcatcgccagcatgcaaagccccgcggagaacacgataatcgacggatagatgacgattcccggccccactctgtcaaacagctttcctgtgaaaggacgggcggccatcatcgtcacggcgaaacagacgaagaaatagccgctgacatccaacaggtggatcgtctttgcataaacggataaatatgaagtcacacttgaataacagaaagaaatggacaacccgacaatcgcgattttaagcgcgcctttttcaaacatgtcggagaaagaaaaacggaacacagtcgttccgctgttgttttgatccggcacacgaatcataaaagcaatcagcaagcctaaagaaacaaatacagcaaaaagcgtaaagaacaccgggaacgatatgactttcacaaggctcagtccgagaaacggaccgatcgccatggcaaggttcatagacatcgcaaaataaccgagcccctcgccgcgccgcttggcgggaataaggtcagcggcaattgcgcctgtgaccgtcgttaaaatgctgaaccagatgccttggaaaaaacgcagtccgagcagcagatagaaattgtgtatcggcaaatacagataagaagacagggcgaacagcgccagagatacaatcgtcattcttttcttaccgaaccgttcaataatcgcccctgaaaaaggacgggtgataatagcagataacaggaacaggctgatcaaaagccctccttgcgattcactgccgccaagctcctgaatcatatagataggcagcacggccaaaaatgtataaaagaacacaaagacaaataaatttacgagtacgaccataataaaatctttggtccagatcgagtcagatttactcaaaagtacagcacttccctttctttattatttcgttaaaaacacattcagaaactcagaaaaagcttccttatctccatcttggaaatccgcaagcatgtcttcctcgaacttcagcatctcttgattgatgctgttgtatttcaattcagcttccttcgtcaggacgacgagcttttcccgcttgtcttctccctgttcccgctgaatccagccgttttcttcaaggcgtttgatcgttctggtaacggtcggcgcctctacgttcagataagaccagatttctttttgggtcatcggtccgatcgtttttaagcaatataggattgaccattgagaggagtacaggccgaatggttccagccgttcattggctttcttcgtaatcaggcgggcgcattgattgatttgatgaatgaggcgtctgttgacgtggatcatttccgttctccttttcaaaaaacttacctaagtaactaattgtgctgtttcattctacagcaggatcgcgcggatgtaaaccccccgttcaaaaagcagaaaattatgacccgccccttgtccttattgagtttttagcatattcccaattcattgctaatacactgttacaaacctatcaaagagagtgtttgaggtgagggatcgtgggcatatttctaaaaccttcttatataatcggacaacgaagaagctgcatcatcagtgaatctgttacagaatacggatctcatttcacacttctcacatccaactggggaggtcgagtggtgtgcacgattacatcaaagagcgaacaatcaagattggtaagtatatcgtggagacgaaaaaaaccgttcgtgtcattgcgaaagagtttggtgtttccaaaagtaccgtacacaaagatctgacagaacgcctgcctgaaatcaatcctgacttggcgaatgaagtaaaagaaatactcgattatcataaatccatcagacatttaaggggggcgaggcgacgaaattaaagtacaagaaggatgaaattcttgaaggggagcccgttcagcagccgtagcgcctgacgtctgccgggcccttttttctcctccgggcggtttcgcgaatatccgcaaaattttgtcaagaacttatatcgatcagcagcttttttttgataaattatgataatatatataattagggcacaatgtggatattttactgtgaaacagatatcaaggaggatataaatagatgtttgcaagggatattggaattgacctcggtactgcaaatgtactgatccatgtaaaaggaaaaggaattgttctgaatgagccttccgttgtggcacttgataaaaacagcggcaaagtgctggctgtcggtgaagaagccagacgaatggttggacgtacacctgggaatattgttgcgatccgtccgctgaaagacggcgtaatcgcagacttcgaagtaactgaagctatgctgaaacatttcattaataagctgaatgtaaaaggacttttctcaaaaccgcgtatgctgatctgctgcccgacgaatattacatccgttgagcagaaagcgattaaagaagcagctgaaaaaagcggcggaaagcatgtgtaccttgaagaagaaccgaaagttgccgctatcggcgcgggtatggaaatcttccagccgagcggtaacatggttgttgacatcggaggcggtacgacagatatcgcagttatttctatgggcgatattgtcacctcctcttctattaagatggctggggacaagtttgacatggaaatcttaaattatatcaaacgcgagtataagctgctgatcggtgaacgtaccgctgaagatattaaggtgaaggtcgcaacggttttcccagacgcacgtcatgaagaaatcaccatccgcggccgtgacatggtttccggcctgccgagaacgattacagtaaacagcaaagaagtggaagaagcccttcgtgaatcagttgccgtcattgtgcaggccgccaagcaggttcttgaaagaacaccgcctgaattgtccgctgacatcatcgaccgcggcgttatcattaccggcgggggagcgctgttaaacgggcttgaccagcttcttgccgaagagctgagggtgcctgttcttgtcgctgagaacccgatggattgtgttgcggtcggaaccggcgtcatgctggataacatggacaagcttccgaaacgcaaactgagctgatgataaaacctcattctgaaaaagaatggggtttttttctgtcaaacccttcacgaacgggaatgtaaatccgataataagaaaaaatgctgattttcattatagaacaaatgttccggtgaggcaactggaaataatgctatttcagaggtggaagacttgttaaaaggattatataccgcaacgtccgcaatgattacacagcagagaagaacggaaatgctgtcaaataacatcgcaaacgcgaatacgtcaggatacaaagaggatcaaggttcaatccgcgcctttcccgagatgcttctgagccgaatagaaggcgataaaaaaacgaaaatcggttccgtcaacacaggcgtatacatgcaggagctgaaaccgttgtttacgcagggaagcctgaaaacgaccgatcagccgacggatatcgcgcttatggagaatcaggttcccaagaatgccgaaacgaatgaaaacgccgagctgttttatcccgtgcagactgcgggcggcgtccgctattcaaaaagcagcactttctcattaaatgaaaacaatcagcttaccataaacggaaaccttgttttatcaacaaacggacagccgattacagtcgacaatgaaaaattcaccgtatcagaaaacggaacggtcacgacaaacggccggccggcggggcagattgacatcaggatggaagaagacgtgcgcaatctgaaacgggacggcaatgacctatacagcacggccgacggcactgaactgccgagcgcggcggcgaatccccaggtctcgtattcattaaagcaaggcgtctcggagctttcgaatgtggacgtgacgagcacgtatacagaaatgacggaagcatacagatcatttgaagccaatcagaaagtcattcaggcttacgataaaagcatggataaagccgcaaatgaaatcggcaaagtgtaacaaaatgggggacgttcaattatgatgctcagatcaatgctgacggcttcaacagccttaaatcagcttcagcagcagatggatacagtcagcagcaacctttcaaacagtgatacgacaggctataaagcgagggactcccgcttttccgagctgatcagacagcagtatgaccatatagatgacaaaaaggaaaattcgccgaacatgcggaaaacgccgcccggcctgcgtctcggcgccggaacggtcatgactccgcagctggactcagggcagggaggcatcaaaaaaaccgaccgtgaccttgatatcgcgttcacctcaccttatcaatatcttcaggcagaagcggacggacggcgggtgtatacaagggacggctcactttccctcaagccggccggcggaaatgaccgggtgcttcagctgttgacagcgggaggcaatcccattctcgatgagaacggccagcccatacaaattgacagttcgctgaatcagctgaaaatcagcaaaaccggaacgctgactgcttcagacccggcaggaacccgttcgcagacgtttaatctcggcatcgtcaatgtcaataatcctcaggcccttcatgcggaaggggataatctgttttccgtaaacggagcgggggcatcagcgattgaagagcttaccggcgcaaaccggcaggcaatcggcatggagcagggcgcgcttgaaagttcaaatgtcgatatgtcaaaagaaatgaccgacctaatcgtgtctcagcgttcctatcagctgaacagccgcacgattacattgggagaccaaatgctgggcttaatcaactcagtcagataaaagaaggggcgttttgatcagccgcgcatgataaaaaatgcggctttctcaaaatcgcccttttttttgtagtaatcagtaatatcctgaagcagcacttccaaatccacccacgcttcaattttctgcagctccagcacgagtttctgcaatcggtcgtacgggtcctcctgagcggtgtacagtatgttgagcgcggtcagcttcaatttcattatcttgttctgcactttttcagatatgtataaacctttctgcagcacggtttgtccttcggcggcatatccggttttaaaaagtgctctgaccgcttcgtatacacaatgcaggtaggaaacgggagactctttctcgaaacgctgattgcccaatacctttttgtaaaaagggagggcctctttatcttttttctgggcggtctttaaaaaaccaaaattataataggcgtggcacagcaggttattgtcattgatccggtccgttatctttatggattcattaaagagctgttctgcgtcttcatagcgtgcctcgtctatgtaattcacggcgagaagcagacggcagctgagcgtttttttgatgtaaccgaattcaccttgatagatttccagcgctttattgacatattgaatggagagcgcaggcgacttcatcatgtaatatgcacccgctgttttataataaaattcagcggcttcgaaacggtcctgaatggccggcaggtactgttcagcttctttaaagcggcagacagcacggttcggagcgccattcaccatatggaataaccctttgaaaaaatagaaataataagttaattcatggtccatctcatctttgcgccgcttcagctcgcagaacaatttagtcagaccgtcttttttctcaaacagcagctgaaaccgtgcgaaaaacagctgatatctgagtttgagctttgcattcttttgtaatttggggagatgctgattgatttgttcgtgaagggaacgggctagatcgaattggcgttttcccatggcgtcataccactcattcagcatcaccagcgtacgtttttcagtaaacttagcaatcatcttccaacctctttgcatagggtaaaaatctttatttatcataacacattaatggacgaggctcattgccagctggttacagtttacagcgcggttgaaaaagaaattgattcataatatacttccaaatgtacagattggttagcgcatataccttctatacatactattgtcgatgaaggagatgtcaagaaaatgcttgatactcagcaaattaaagaaattattccccatcgctatccgtttcttctggtagacagaattacggaagtcgaagaaggaaaacgggcggcgggatataaaaatgtgacggcgaatgaagattttttcaacggccattttcctgaataccctgttatgccgggcgtcttaatcgtagaggctttggcgcaggtcggagcggttgcgatgctgattaaagaagaaaaccggggcagactcgcattttttgcggggattgataactgccgtttcaaaaagcaggtaaaaccgggtgacaagctggagcttgaggttgatattacccgcgcgcgcggtacgatcggacgcggcaaaggcgttgccaaagttgacggcgagctcgtgtgtgaagctgaattaacatttgcgctcggagaataaaaacaaacgaatgggcttataaaaaagcccattttgtatagaaaggggtgaatgtaatgtggtcagaatttaaaagctttgcgatgcggggcaatatcatggatctggcaatcggtgtcgtcatcggcggcgctttcggcaaaattgtgacgtcgctcgttgaagacatcatcatgccgcttgtcggcctgcttcttggcggtcttgacttttcagggctggccgtgacattcggcgatgctcatatcaagtacggaagcttcattcaaacgattgtgaacttcttcattatttcattttctatctttatcgtgatccgtacaataggcaagctgagacgtaaaaaagaagcagaagaagaggctgaagaagcagaagaaacagatcagcagacagaactgctgactgaaatcagagatctgctgaaacagcgggctcctcacaatgactaaggcacaaaaaaaggctggatgattaacgtccggccttttttatgattataatttttgtttaaacgcttcaatcagccggctgcccgagtagccttctttcacgagcgactccagaatgctttctgatccggggtggtttcttgacaccatttgaccgtaaattaaaacttgtatactcttttccagctccacaatatttttgatgcttcccgtcagctgggcggggcggttgctttttttcgtaatcgttacaaacaccttcgcttctttctggcttttcatcagcatgtcaaaaaaagaaaagtgttcggccgggaccagtgcttcaattaaccagtggttttctccgtcctctttgttgataatcaatccgtctaaaaggggaaactgttcaatcggctgatcgtctttatctaaacgttccacattcagatcaaccagtttaaaggttttcatctcttattttcacccctgttgtccatgtttttcgttcatttattataacacatatcatttttcccgggaaaatgctgtaagacatgcttcatcatttttgtaggcggtcaacatttaatcatttctattttttcattataatgtaaaagaatatggtcatggagagatgcttatgaatcaattgcgcctgaaggaaatctatatagaagacggttcaaggcgaaaagacgatcattcctacttggtatgcaaaaaggaagattgtgaggtgcatcttaacagaaggggaaatgtcgtctttttatatgaaacaaaagaccgcatggaacagtataaaattcagctttcattgactgataaaaagctgagtttttactggttcgcatgggacggcggaaagtttgtccgcatgtttgagaaagactggctcaaaacgaaacttttctcgcggctgctcaaaaatacatattacataagcggtcaaaaacaaaagttttttttatcagaaagaaaaacaaaaacataaaagcagcccaaacggataaaggctttttccgctttttgctttcataagcctttatactacaatgaagccagcctcgaaaaagagaggaggagacggcttgtttaaccacgttatgcttgtcggccggctgacgaaagacccggagctccgttttacatcagcgggcattcccgtcgctcatattacgttggcggtaaaccgcaattttaaaagcgcgtcgggtgaaaccggaaccgactttgtcaactgcaccatctggaggaaaaacgctgaaaacacggcattgtactgccaaaaagggtcaatggtcggtgtaagcggcagaatccagacgagaagctatgaaaagacagacggcgtaaaagtttatgtgaccgaggtcatggctgataccgttcggtttatggatcaaaaacggaaagagccgctggctgaatagcatgcttttttcctcgatttcccgcctttcagcgggccccgcaatacctccttcccattcgccagtcgaaagactggtttttttgtgcgggagctgaaaaatggttaaaaagaagtgatttcgcttataaatacttaaaaacattgaatatattgggataaaaacttataattacttacagataagtgacgaaaaaaagggaatgaggacgtgtatcaagaagaaagactgattgcgataatggaatatttgaaacagcaccggcggatcaccgctgaacagatatgttcgctgcttcatatttcaagagataccgcaagaagggaccttgtaaagctgaaagagcgaggggccattatcagaacacggggcggcgcgattctgccgtcagtgaatcaggaagttccgggctattcgggccggctgaaaaccgtttctgaagagaaaaacaaaatcggcaagctggccgcatccctgattcataaaggagaccggatcatcctggacacatcgacaaccgttcaggcctgcgcggagcatttaaatgtcaccggctgcactgttattacaaattcgatcaatcaggccgatatcctttccgcaaaagagggaattgatattcacctgctcggcggaaagctccagaaggaacaccggtttttatacggggcttccgttgtagaaaaactgggggattatcacgctgataaggtgctgatcggcgttgtcggcatctcggaaaacggcctgacgattccgcatgaagaagacggcatggtaaagcgtaaaatgatccgtcaggctgaacaggtgattgcgctgagcgatcactcgaagcttggccgtacgagtttttatcagtatgcagacctgcacgaggttgacctgctgattaccgatcggctgcctgatcaggatttttgcgatctgctcgaccggcacggcgtagaattgcttgtaactgaatctgaagaagaggatgaggacatgtgaaactgattgccatagatctggacggcacactgctgaacagcagtcatcaagtaagtgatgaaaacaagcgggctttaagggaagcccggcaagcgggaattgaaatcgtggtttccactggacgcgcgcattttgatgtgcactccatatttgaaccgctcggcataaaaacatggattatcagcgcaaacggagccgccatccacgctcctgacggcagcctgtaccattgtgaagcgattgaagaaacaagagcccgggggattttgtcatggcttgaagagaatcaatattattatgaggtgtttacaaacaaagccatctatacgcctgaaaccggcaggcagctgctcgatatcgaaatggaccgggtgaaaagcgccaatccggaaaccgatctttccgttttggaacaggcggcttcagtgcaatacagccagtccggctttgcttacattcattcataccgtgagctctttgagaaagaagagcatctggatttttataatattctcggattttcgtttgatgagcggaagctgaaagcgggctgggaccgattcagcggtcagaaagatctcacccttgtcagctctgccgatcacaactttgaagtggcgtctcgaaacgcctcaaaagggcaggcgctcaaacggctggcgcaaaagctcggcattccgatggctgaaaccgccgcggtcggtgacagcttaaatgactattcaatgcttcaggcggccggaaaaggcatagcgatggggaatgcgagagaagatattaaagagatcgctgatgccgttacattgacaaatgatcaaaacggcgttgcgtatatgatcaggaatttactgtgaaaggtatggcgatactgttcatgactggcgtgacgcattcatggcaaatgcggcgtaacagtaaggacgacataaaagaccggctcttccgagagagccggtctttttgcgtttaatgtgattgcgtcgatgcgctgagggtgaataattcttcaagctcatcggatgacagctcggtaatccaattttcactttggataatctgatcgttcaaagtttgtttcgtttcgagcatggcatcaattttttcttcaatcgttcccgtcgtaatgagtttgtgaacgtggacgaaccgttcctggccgattcggtaggcgcggtcggtcgcctggttttccaccgccggattccaccacctgtcatagtgaatgacatgattggcagccgtcagattcaggccggttccgcccgctttcagtgacaaaatcagcgtcgggtattctttcttctggaaccgttcgacgagggaatcgcgttcctgcttggacaggcttccgtttaaaaactgaaccggttctccgaatgttttttccaggaggcgcttcatcatgttgcccatctgaatgtattgtgtgaaaatgaggcagctttccccttgtccgcggatcgccgccattaagtcaagcagcttttccagtttgacggatctcccgtttaacagctctgtctgttcttccttcaaatagagcgcaggatggtcgcatatttgcttcaagcggccgagcatgctcagaatcagcgctttccgctgcatcccggtcagagaagccatatgttcaaatgtatctttgacaagctgttcataaagggatgcctgttcggctgagagcgggataaactctttttgttccagcttgtcaggaagattaagcgccacttcttcatcccgttttgtccggcgcagtaaaaacggccggattaactgctgaagctggttgattcttttttcgtcacggtctttttcaatcggcagcacatagcgtttatgaaagccggtcagactgccgagatagcctttgttcataaaatcaaagatcgaccaaagctctgtcaggcggttttccatcggtgttccgctcagcgcgatatgatggacgcctttcagctttctgattgcgcgggactgcttcgtatgcgcgtttttaatgttttgcgcttcatcaaggcagacggtgctccatgtcacggaagaaagctcttcctgatcggcgtgcgagaggccgtaagaagtaagaacgacatccgcgtcctgataggccgggacaaatgcttcccccttcggcctgcgggggccgtaatgaagcacggccttcagctgcggcgcgaaggtctggagctcacgctgccagttgccgagcaccgatgtcggcgcaatgattaaggcaggcgctttttgccggccgctttccttcacatggagaaaataagcgatcatctgaatcgtctttccaagtcccatgtcatctgcgagacaggcgccgaagccgttttcccgtaaaaacagaagccagttcatgccgtacatctgataagggcggagctggccctgaaacgcggcgctgacttcatgctccggcagatccccggcatccgtcagtttgcggatcaggcttctgagatgctttgataattcgatcttgatcccggcaaatgccgatgagtcaatgatgtccgtgtcctcggctccgttttccccgtgatccatcagttcgcgcgccagcacgtcggacatgtggaggccctcagattccgctttttccatcagtattttcatctgtttaataaattgcggatcaattttcacccattggccgcggatgttgacgagacgtctgttgtttgcgacaagctcattgaattcatcctctgtcagctcaatcccgttcgtggcgaatctccagttgaaatcaagcagagcgttcatgccgacgaaggactcgccccgcggggaggatgacactttcgccttaagcatcatattgctgtcccggacaatctgccaccatgatgggagaagaatctccacacccatatcgacaagcgtctcactcgcttccgataagaagatccaagcctcttcttcagatatcagcgtcgttcctgaatcaaacgaaagccagggaaccgttctgcggaagcggtcctgttcacgcgcgatttttccgctgtatgcctgccacgcttttttcagccctttcagtccgtcgaaaaaggtgatggagccggtttttttctcacgtaaaaacatctcgattttccagtcgtcaccgtcgaaatcaggctcgtttaatcggaggccgacggtaaacggcgtcagatcgtcatgccagccgattccctccagaaaatcctcttcatccaaaaaggagcctttaaacgtatgaacggccggcgaacgggtttcgatccgccgccatttttccagcaggtcatcattgtactgaatgtagtcctgtaccgcggctgagaaccagtctgccgtaaagccttccagcaaaagctcgcggtctttgaagcgcaggaggccattttgccatgcgtcataatccggaagaaaatcgccgtcggcaataaattcgtatatcgtcgaagccgcttcgattaacggttccgtttcctttgtcagctgcacggtgctgaatgaattgaacgagttttttccaagcagctcgacggtcatccaagggctgagcagaacggccggagtgccgatgaagctgacgtcttcaagaaacgttccgtaaaaggtggactcatgccattggaacaaatgagtcttcatctgactgagagtaagcggctgctccttctcatcatggcttgacagcgtaaatgtccaatcttccatttgttctacatgaatgaaaatttccttaagactcgccatcaatcaactttcctttctgcaattcttcttgaagggcgcgcagcctcttgtagcttgcgctcagccggctgatataacgctcccatacctgctgtttttttgcctttttataaagcgtccgcagttttttcagatggcgcgcagcctctttataggcgctgcggtttttttggtcgataaaaaaggccgccgcccggtgataggaggggatgagcgcttccggatcactggcggcaatttccttcaggatgtccttttcaatttcccagacggaaaaaccgacgaggctgtgaatctccacccattccgcgtaccgccgtttttcgtacaggtactggctgtattcggtaaaggtatagggaaggcagccggaagcaaaccgttcaaacagctgatcatcccgtgagtgccgcgcataatccgccaacagcgcaaacagctctccgatgatgtcgcgcatttctttaaacggcttatcaagcttcgtatagttcacggcaagcggttcgatccggccataccatgttttcagccgtttccagtcttttttcgcggtgagttcaccgagccattgaaaagtgtacggcagcgcttcaggagggaagcgggacatatcttcaaagaccgcttcatcatctttttgcaaaaaggccagatgaagccgtccgaaccgcacttccggcgaaaaacggcgcccgctttcctgttcgagaatctcttgttcacgcgcgacccatttcggccggttcaaaagcgcgctccacatttcaccgaatacccggaggcgttcgtattgaaaaagctcttctttcacaagcagtctgcggagcaccgggggcgtccggtctaaaaaaggatcgagtgaaaaagacaaggcgtacgttttcagtctgtcaatggaggaataaatcgtatccatcagctgttccacgtatggattaatgctgtaataatctttttcggcatccaatctgcctgactcaatcaaagtgaacatgtgaagccagacggcaagcgccgaatgaatctgatataagcttttaagctcgggttttttcggggcgtgttttttgagcgctgacagatagccgtaataaaggccctgcatcgtctggcttccggccggcgtccgcgcctcccacagcgagaattccgaatcaaaaaaagcgagccagcttgacagcgactcttcattcggcagcactttttcctgaaactgccggcggacaagctccctgctttcctcaagcttttctctttccagccaatgttcggtaaaggtaccgacccgctcgaattgggcatatacgtaaagaaaaacggcgagcacgtggcggcagatcgcctcagacgggcatgcgcagccgcttttcaccatgaaaaataagttcagcgtgacccttacaggcacaacatcctgcacatatgcggaaatctctgtcggggtttgaacctgtatacgatagacggaatcctgccgatataaaatgagtgctttcttcatcagctgaacattgtcttcattgtaaggaagaagttctttaagctgttcagccgctgcgagcacatcttctttagcaatcatatcctgaagcatgattatcgctcctaacgagtcacaaaataaaaagattccaattcctctattatatcgcaacacatggcccggaaaaagtttttcctaaaaaaggacataaaaacccgaatgtgtcgaatgatgtattagagattgcaaaacagcacccgacagcatataataatcttgttttcaatttaatggaagccgaaaggaaacgaatgatgaagaaaacgaagttagatcaagaggagtttctgaagattttaatgcatgcgcacgacatcggtgagcagtcctctgagatgaccacaaaagaaatgcttgagaatttgatttcttatattaaaaatggatatgcaacataaaatcccgcagcctcctggccgcgggattttttaatcttcctgtgacaccagtatttaaagcgcttacaaatataatacagattgaagtgattgtctatttttgtcgaattttgtcatttgaaaaggttagaaatgacagtttaaagctgtataatcgtaattggaaaagatcattggagggaatgggaatacacggaaagtgatatggaggttatatgggagaatctgcaagcataaaggaaatattcgcaatactgagaaagcgtctgctgtttatacttattattaccgcggcggcatcttccgcaggcggtctcatcagtttcttcgctcttacgccggtctatgaaaactcaactcaaattttggtcagccaatccaaaaacaatcaaaaagaagtccaattcaatgacgttcaaaccaacctccaattaatcaacacgtataatgtcatcatcaaaagcccggtcatcctcgatgaggtgattaaacagctgcatctgtccatgacttcgaaagagctggaatcgaaaatcacggtatccagcgagcaggattcacaagtcgtgacgattgccgttcgggatacggatgctaagcgggcggccgttatggcaaatgcggttgcatccgtttttcaggacaagatcaccgccatcatgaacgtggataatgtcagcatcctttcaaaggccgaagtgtcggacagccagtcaccggcagagcctaaccgtaagctgaacatcgcgattgcgtttgccgccggacttttgggcggaatcggtctcgcctttttgctggaacatctggataatacgatcaaatcggaagaacagctggaagcgctgctcggcatcccgatcctgggaacggttacttcaatcagtactaaagacagcgttgccaaaagcttgaggatggcggaaaccaaacaagcgggaggcggacatgttgacgcgtaaaaaagacaaacccggaaaacgaagcgtgattgcgatgtctgagccgaaatccatcaactcagaacaatatcgcacgattcgcacaaacattgaattttcttccgttgatacggaggtgaagtcccttttgatcacatccgccggtccggaagaaggaaaatcgacaaccgcggccaaccttgccgtcgtatttgcacagcaggggaaaaaagtgcttttaattgatgcggatctgcgcaaaccgacggttcatttcaccttcaaattggataacggaaccggattaacgtcgctgctgttaaaacagatgccgtttcagaatgccgtcctgccggctgatgaagcaaacttggatattttaacgagcgggccgagcccgcccaatccggcggagcttttatcgacgggtgcgatgaaagatcttctgtcagaagcagccgcagtttatgataaggtgattttggatacgcctcccgttttggccgtagccgatacgaaaatattaggcagctacactgacggggccattatggtgatctcaagcgggaaaacggacaaagaaaaagcggccaaggcgaaagaagcgctcgattactgcccgtgcaagctccttggggccgttatgaacgggaagaaacaaacgaaacattcggactacgcctattacggacaataatgtcacaatgggcgcggtccattctttttaaggagggattgaaatatgatagatatccattgtcacatccttccttccatagacgacggcgcggcggatgatacagaaagcctgaagatggcgagagaagcggtcagacaggggattgatacgatcatcgcgacgccgcatcatgtgaaataccgctatgacacggatcggcatacggtcaacgaagcggtcagcctgttaaacaaacgtttgaataaggaaggcattccgctgactgttctgccaggccaggagatcagaatagacggagatctgctggcaggtcttcaaagcggctcgcttgccccgctccataatacaaagtatgtgctggcggaatttccggcggatcatgtcccggcctatgctgaaaggctgttttatgaactgcagctgaacggatatgtccccgtcatcgcccatccggagcggaacagggaaattcgcgaaaatccttccgtcctttacagtcttgtgaagaaaggggcggccgcccaagtgacggccggctgcattgccggagcattcgggcggaaagcgaaatccttttcgctgcagctgatggaagcgaatttgatccactttctcgcatctgacgcccataatctcggaccgagaaatttttattatcaggaggcgatcagcgttctgaaaaaagaagcaggggcggagctgatttacatgctcacggaaaatgcggcgcttctcgctgaaaacaaagccgtttataaggaacctccgctgcctgtggcccgccgtaagcgctggggtcttttttaatcgtcgtctccatcccgtttaaatgaagcgtaagcggctgttttgcaagatgattcttttatgcttatgctattatcagcggccggcgccgttttttcctatcatgacctcaggctcccggcattccgccggtgccgggatcatatgataatagcggtaagctgcccagcagcaatttctaaacggttgggggaacacgatgaaaataacagtgatcggaacaggctacgtcggtcttgtgacaggagtgtctctttcagaaatcggccatgacgtaacatgcatagatattgacgaacgtaaggttgagcagatgagaaagggattgtcccctatctttgaaccgggccttgaagatatgatgaaacgaaatatcggccggcatcggctggcatttgaaacgagctacgaaaaagggcttgcggaagcggacgttatttttatagcggtcggaacgccgcaaaaagaagacgggcacgcaaaccttacttatattgaaaatgtcgccgaacagattgccgaacatatttctaaagatgcgatcgtcgtgacaaaaagcacggttcccgtaggaacgaatgacagaatcagcgaagttattcattcacggctgagagcggacgtgaacatttcaatcgcttcgaatccggaatttctccgtgaaggttcggcgattcacgatacctttcacggcgaccgcatcgtgatcggggctgaagaccggcagacgcgggaaacgcttgaccgggttttcgcgccgcttgcgattccggtatatcatacggacatcagaagcgctgagatgatcaaatatgcgtcaaacgcatttttagcggcaaaaatcagttttattaatgaaatttctcatatatgtgaaaaagtcggtgcggatgtggaatcagtcgcacacggaatgggattggataaacggatcggcaatcaattcttaagagccggcatcggttacggcggttcctgttttccgaaggatacaaacgccctcgtgcagatcgcgggacatgtggagcatgattttgaattgctgaagtccgtcattaaagtcaacaataaccagcagtccatgctggttgataaagtgctgaacaggctgggcggtgtgacggggaaaaccatcgcgttattagggctgtcttttaagccgaatacagatgatatgcgggatgccccgtccattgtcattgcggatcgtctggcggctcttgacgcccggatgacagcgtacgatccgatcgcgtcattccgggcttccgggctgcttccgtctgcggtttcctatcgggagtccatagaagaagccgtcaggggagcggatgccgtcctgattctgacagattgggaacaaattaaacacttcccgcttgaagcgtacaaagagctgatggaaaccccggttattttcgacgggagaaactgccactcgcttgaggaagcggaacaggcgggcgtggaatatatctcaatcggaagaagagccgtcgtgcctcagactgattctgtcacttgaaaggccggcggtccgcgccggccttttatcatacaatcattagagacgaaggagatattaatcgtggaaaacacatggaaattgccgaagcaaatggaatcatcccgcggtctgctggaaacgtcagcacggccctttatcaaactgcacgtcaaaaaagctgaaacgggactgtatgacaataaaattgccggagacccctattttccgaaacatgaaccataccctgaagatgaaagcggcaggccgatgaagcttctcgcccaaatcaattttgcggatatgcccggactacctgattttccggacaccggcattcttcagttttacatatcggtcagtgatgacgtatacggtttgaattttgacgacgggtgcgcgcaaacgggtttctgcgtcaaatattttgagcacgtgacagatcgggaagaggagctcatggatgatttttctttcgttcaggttgaagaggagtacgattttccgattcaatccgaagcgctgatcacccctgagctgtctgctgaatgggcgctcccgtctgattttcaattcaggcaatatgccgggatggatgccttcgactatttcgagcagtttgacgatgaggtgtatgacgaatatacggtgaacgcattcggccataaaatcggcggctatgcgtccttcacccaggaagatccgcggtcttattcccatcaaaaccatacgattctgctcttgcaaattgattcagatgatgacattgattcgatgtggggagatgtgggaatcgccaatttctttatcagaccggaagatttgaagaaaaaagatttctcaaacgttttgtacaactgggactgcagttaacgacattattagaatcatgatacaaggcaaaggagacggttattcactgtctcttttttttagggaatttatcatggatacatagaggagatcaatgaatggatatgccgtttgtgtgagtcttttggcgttaatgatgagcatctcggctgctgaaaataagtcatttaacctatttaagctgctttctgtctattttaaaatataatatatggaaatatagtatggaaaagtctgtgctttttgtacgactttttgcgtaagacgaggtgaaaacagatgagccattcaagcacattaagccatattaacagcaccatcagccataaactgggcgagatcgaacaccaaattgataaattaaaagaagcgaaaagagagatagaatctctgcaggaagagggcgtgtctgaaatcagggacatcctcaggccgcacctggatcatcattggaccggcacttttgctgaagaatttgatgaccggcgcgatcaggcccatacagaagcatacagaatcgtcacagacaaatacgacggttatatttacagaatcggcttaaagatgacacagcttgaaattgaaaaaggagggctccttgccgccagaagcatcgcgagagaggcagagcacctgctgacgctgggagaagaagcccttgacacggtcggagaaaaaatacaatcaatcaaaaaaagctggagttggttttaatggcagaaataaaactcaaatacggagccgtcatgaagcagcttgaatccgtcagcagcgctttggaggccgtttctatcgggaacgccggtacaaacggaaaaaacaagctcgactatacctccaaataccaatcccgcgaggcaaagcttgtatcgatgatcagcgaatacaagcaggccgttcataagaacatagcggacgttaaagacaacgtagattctttgaaggaacaggacgaggcgatcgctgtaaaataacgaaagaaaggacttgccgatgagcaaagtgtttgaatcacaatcgttaacggacgaagcagataagagaaagaaacaatacgaagcccttgaagaacagctgcgtgcgctcaaacaagcctttcaaggcgtggccgatctgggtgatgctttgaaagggaaaggcgcagacaatataaaggatttctttcagggacaagcggaaatcgccgacagctggctgacgcttgtctctgctcaaattgcgtttttaaatggcatttcaggtgacattaaagatcaagagctcagtgattcatatgcggagacttcatttttagagcatgagctgcccaatgcggatttgagagcttcagagattgtctccgctcataaagcagaaatcgattcgattttgtctggcatcagtgatattattcatctcgatacatatacgctggatgattacgcagataaaatgggtgatgcccagaaaaccagacgcgacacgatcacggcagtcgatacgcttgatgaatccctgaccgctgaatatcaaaacttagaatctctggacaacgcagtgctcagcaaatattcccttctcatgcaggccaccagcaacgggaaaagcgcctcccctatgtactatgacaaaaaagccttccacagcaatgaaatctacaaaagcgtcatggcgacagaaaaacagggcacggactatattgacgcaaaagcccagcaggccgaagcaagacggcttcaggaaaaggctgaagaagaagccaataaaccatggtacgaaaaaacatgggacggcatctgcaactttaccggcgaagtcaccggctattatgattataaaagagcagccgaaggtgttgatccggtgaccggcgaaaaactctccaccgcagaacgcgtcacagcaggagcgatggccgccgccggattcataccggtcgtcggctgggcgggccgcgctttcaaaggcggaaaagccatttacaaaaccggaaaaaccgtcattgccgcagaacatgctttagatgcctataaaaccggaaaatccttagacattctcaaaatgacagaaatgggcgcatacggcctcgtcgcctcaaacggattcacagaagccgtcacaggacgggatatgttcggaaacaaagtgtctgaggaaaaacggaagcaaggggcgctggaagctgcgctgagtttggttggagccggtgcattggcgaagcatgtaaacaaaggcataccgcttgcaacccattcaaaagttcaaaaagctaacaagacactagaaaaagttaaacaattcaaagtcccgacaaacgtccgcgtgtacgcagaacgcccagtaacagcgaacggctttacgtacggattcccaacagtccgtgtcgatgtggaaaagacggctgttaaagaacttgggattgtgaagatggcgagtagccagtcaaaaaaaccaaaatggttggaaaaacctgaggggatgactcaaaatgattatgttgctcataatggtactaactacagtaaaaagaaacggactgaagaatacaatgctgcgctagctgataaagagaagatagttggagacaattcaaatggatatcgtttaaaagaaccaactaactggatggaagaaagaggtatgatacaaataaaagaaagattaaaaagaaaatcttggtcagatagagatgggtttaattggcaatgggattcccagcatggtaaattagaaaagtggaaccgcagaagaacagagcatttaggagagtttgatcctgtaactggtaagcagacgaaaaaaggcgagccttcaagaagatgggatggttaaaactatggaacatggaatcagatttattaatgaataccctgaaatcggtgaattgcttcatcgtctatttgtgaatagggaattagacgaatggtacaagagcaaatgcgcagagaaaataaaagtacctgatgaatttaatcaaataaaaggtttgaaaaaaattgaagttagagatttaaacaatccttcaggagaaattgatatccatttgcaagatctttctggggaaaatggttttcatttagaacagcaaatcaatatgaaagtatctaaattggttcctgtttatgtattagattatagttattccctaagacacgatttaatagatggcgcttatgacattgtaggaaccgctgaatctttagaattcattcagggaacgaactatattaataaaataatgcaagagaaagggtttatcgaactcagttatttgtatgattactacgatactgtgtatgagtggagtgaattgccacatatacagcctttcaacaggagattaacattaggagatgccttgtttactgatgtattagaattgctatagttaagagcttgccttgttgttatcggcaagtttttttataataatttaacaatgtggagtacaaggagaagcagttatggatagagaccatatttctcaattgctgccattaaaaatctgtaatggctggtctgtagtactgaacaatttaagttcagaaaaaagaatgcaagaaaaatatgaattactaaaactacaaaatgaaaaacgtaatgctgttattaaggtaatatttgaaaatgattaataccatgtcatagtagcgggcttaaaaacagataagatttataaagaagactcttttaatgaaatagaacaattattggaagagttggaatatcaaatctggactgtgggaagtggggttttagagggtttgcagcacctaagccaacatgttcccaatttcttaaggcttaagataccagcggggtggactgttgattatattccattaaaagatactgaccctaaaactctagaggaaaatgatgatgcttggttatttgactttaatcaagatctcctgcagtttctcataaaactaaaaatttgctgcttgtagggtggtacccagaaggggatccaaccggcagttatggcattgaactgataaaaaacaaagattgggaaaatcctttagaagatattatgtgtactgaacttaaagaattacttaaacaattggatcttatttttatgaaagaaatgaaaaatgaattttaataaaaagcagattatactatctgcttttttcaatgaagcatatggagtcttcgctagatcgaaacacaggacgattgagcgcgaagactattttaagagaggaaaacaagtgaaatgaaaatacatcaaattcacgattttgaacaaaaagatgaatcggattttattcgaactcaacaatctcttatacataaaatcaacctatcccccgtcatccatccagactccgtcaacaccagcgcaggcgtcgacctcgcttattgggagcaggacggggaaccgtacggggtgtgcagtatcatcgtgattgacgctgatacaacagaagtgattgaaaaagtgcacagcatggggaaaatcagcgtgccgtatgtgtccggttttcttgcgtttcgcgagctgccgctgatcatcgaagcggccaaaaagctggagacggagccggatgtgtttttgtttgatggcaacgggtatctgcattacaatcatatgggcgttgccacccatgcggctttttttctggggaagccgacgattgggattgcgaaaacctatctcaaaatcaaaggctgcgattttgagatgcctgaaaatgaagtaggcgcctacaccgatattctcattgacggcgaggtatatggctgggcgcttcggacacggcgggacgtgaagcctatcttcttgtcttgcggacataacattgatttagaaagcagctatcagatcacaatgaaaatgatcaatcgagaaagcaggctgccgatccctgtccgtctggctgaccttgaaacgcatgttttgcgaacgttttatcggaaaaatcacatgaaacacttggagctctaagccaccaagtgttttttttgtatgcctggtgtctgctttaaaaaaccttgtcgtccttgcagcaggtttttatttgaatgtttttcgcgtcaaatcgataaatgcctttaatggcgcagacatccacttgtccttatgccatgctagttgagtaaaaacggggcattcattctgccagttgagttctttcatccgtccttcggcaatatcgtcttttactgtcatttcaggcaatagtccgattccgagtccggccatcacgcattgtttgatggcttctatgctgacgaattctaatttattagggtagactccggcgtcatgtaaagtgttctcaaagagcgtgcgatatgaacagccgtcctctgtcagcagaagggtttcattttgaagatccttcaatgctgctggtgagtctgctggaaaaggatggtcattggcggctaccattttgatttcatcctgaatcagagattcaacgtgcagtgcgtcttccgaccgattcacatccaaaatgaaagtgatatcaagctggccctgcaagagctgttctttcgcttgttcgttggaaatatacggtttgaatataagctttacttgaggaaaagcctgtttgaattcttttatgataggcggaaggcggtatgtgcactggctttccgtcgcgccgattttcaaggttccggttgtttctcttgcttgatttgcggccatttttgcttcttctgttaacgcaatgatcttctccgcataggatttgaacgttttgccggcttctgtcaggaaaagccgcttgccgagccgttcaaataaaggagtcccgatttcttcttccagtgatttgatctgagaggtaacgcttgattgtgcatagttaagcatcttggcggttagggtgaagtttacgtgttctgctgcggtaataaaggtgatcagctgcttcaattccatttgatctcgccctttctaaatcggttttatcgattggaataatcgaaataatcatctgtattgattgatgaatccattatatgatgaagaaaatcattcgtaaacaaaggagcagatgcatcatgaacattgcggttattcatggcggaacgaggcctggcggaaatacggatattcttgcggagaaggctgttcaaggattcgatgcggagcacattcatttgcggaaatatcggatccggccaattgaagatctgcgtcacgcccaaggcggctttcgtcctgttcaagatgactacgattctatcattgagctgatattaccgtgtgatattcttgtattcgccaccccaatttattggtttggcatgtcagggacattaaagctgtttattgatcgctggtcacagacgctgagagatccgaggtttcctgattttaaacagcaaatgtcagcgaagcaggcatatgtaacagcagtgggcggagacaaccctaaactaaaagggctgccgctgattcagcaatttgaacatatttttcattttatggggatgtcctttaaaggctatgtgctgggagaaggcaatcgtccgggtgatattcttcatgatcaacaggcgctgtccgctgcgagccgtttattgaaaagaagtgatgcgatatgaagctgctgctggttatctctggtatgttgattcttgcactctttctagcttggaaagcgccgacttctgtttggatacaggctgaaaccaattcacctcaggttcagcaatctgtgagaatggcaggcgcaacgctgcaagtcaagcaaatcatcaagagtgatgcaggcgaagaaacagttgtcatatcaaatggtatttccgggccaaaataaaaaagcacctgtccaggtgcttttctttataaatgaggaatcacaagccctccatacaaaaacgccgcgataatcagaaaggccggatgcatcttgaattttgtcaagacaaggagggaaatccccgcaatcactatcgcttgaacccagccgatcgctttgatgccgtctgcgccgatttgccaggtaagaatgagcatcatgacggcgatgacaggctggacggacagcgtcatacctttgatgacgggggattggcggaagcgctgaatgacgcgcaagaggatgatcaatgcgagcgccgacggtacgacggtggcgatcagcgcaatcaggaatccgggccatccgcctgcgctgtagccgacatacgccgcgattttggttgcgatcgggcccggcaatgcgttcgcaagtgcgagcatatttgagaattgatcgtttgagagccagctgtatctgttgacgacttcttcaaacatcagcggaatcgacgccggtccgcctccatatccgagtacgtttgcgacaagaaacgccataaatacataaatcaagatcatgaggccggcattcctttatcttttgaacgtttctttgtgattttgtcctttaatttaaaatgaaacgcgccgtatgccaagaaaatgataatgacaaagccgggattgatctgtaacgtttgcaggccgataaaagcgatgataaaaaacaggatgcccgtgacccagccgaaacctttaagcgctttttggccaaactcgtacgccatgatgccgagcatgacggcgatcaccggtgttacggcgccaatcatgccggcaacgattgctgagcggcttaagacattgacagccgcaaacaagcccgccatagcgagacatgtaggcagaatatgtgcgagggttgccgcgattgcgcctaacgtgcctttcagcttgaagcccagatacgcagccatttttgtggcaatcggtccgggaagcgcattagcgatcgctaatatttctccgaattcatcatcatctatccatttgtatttattgacggcttcatggcggatgagcgggatcaccgacgggccgcctccgaatccgagaatgcccgttcggaccatcgccgccgtaatgtcccaatagggatgtttcatggctatgtcctccttacagcttcatgcccgttctgcttttataccgtttaatcagcatttggcagtcgacgctgacgacgcctttttgcgtatagagccgttttgtcaaaaactcttccatctcctgatcatttgcgaaaatgccgtgcatatgcagcttgctcggtccggtcatatgataaaggcttgtcaccgccggctccttttcaagctttaatgcggtttcctccaaatactgcggctccacctccacgttaaaaaacacggacacatgacggccgattttcgccgggttgatgacagcggtgaatttttcaatcacaccggcatccagtaaatgctgaatgcggtgctgaaccgccactcgcgacaggttaacccgctttcctaagtctgtataggaaatcctcccttcctcgtgcaaaatcgagagaatctgtttatccgtttcatcaaggacaagattcggaatgctgtactcatgttccaaccggcttcaccttccttcatttggtggatattattgtatcatgaaatgttacggtatgaaggggaaatttttttattgttttcgttacgtaataacttaggattatttcttatcggaaagtaaatagtgtgtgagcttttctttcaggaaggtggataccggtgaagccgctttttatacttaggaaaatttgtaaaggggcttgccatgaatacttcaaccatcggaacgaaacaaatggtcgtcagtccgcattatcttgcttctcaggcggggccggcattctggaaaagggaggaaacgcgtttgacgcggcagtggcggtcagcgcctgcctggcagtcgtgtatccgcatatgacgggtcttggcggggattcattttggctcacttaccataaagaaacgggacgaatcaaagcttataacgggagcggccgttcagggaagcatgtgacgagagacttgtatcggggcagagaagcgatccctctgcgcgggccagaaagcgccattaccgttccgggaatggcggacagctgggatgccgtgctttcggcgtacgggcgtctttcgctcgctgaggtgctgaagcctgctcttgattatgcggcaaacggattcccggtgtccgccgaccagtgcgcccacacagaacgcaatctcgctcttttagcctcgatgccttacacctcggccatttttacgagaaacaaaaaagcgcccatgcccggtgaacggtttgtccagaagaatctggcggccagcttggaacagcttgccgagaaaggcagaagcgctttttatgaaggagatctcgctcaaagcatcacatcctttctgcaaaacaacggcagccgtctgacacttgatgactttaaagcccaccgcggcgagtggacgaacccggtatcctctgattaccgcggataccgcatctatcaggctccgccgaattcacagggctttacaggcttaatgacgctcaatatattggaaaactatgatttttctcagattgaacacggctcctttgactattatcatctgctgatcgaggcgctgaagaagagttttcagcaccggaatgaagtgctgactgatccggcattttctcatattccgctggatcggctgcttgataaacggtatgcaaagcagctggcggaagaaatcggtgacacggctgcgccggcgctaagccgtccggtcggaagcgacactgcttatgccgccgtcagagatgcggaaggaaatgccgtttcctttatacagagcctttattttgaattcgggtcagccgttacggcgggggagacgggcattctgctgcaaaaccgcgggtcatttttttcgctggatgaatcccatgtcaatacacttgaacccggcaagcggacgttccacaccctcatgccggcgatggcctgtaaagaaggaaagccgcacatcctgtacggaacccagggaggagaaggccagccgcaaactcagacagcgatgattacgcgcatcattgattacaaaatggacccgcagcaggcgatcaatgagccgcgctgggtctgggggcggacatggggagaggagtatgaagggctgagggttgaaagcagaatcagccctgaaacgagagaagccttaaggcagagcggccaccgcgtcgagaccgttggtgattttgacgggcttatgggccatgcggcagcgatcgtcattgatgaagaaggctttctccaaggcggggccgacccgcgcggcgacggagcggccgcaggagtatagagcatgatacgctaactgatgaaaaaaataagcacgccaagagcggcagaaagacctgcgtaaaacgaatcgtacacatattgcttttcctcccgccggtgccgccattccattaagccgctgcagcaaaatagcatgaaaacaactcccgcaaatacgtacatttcattgaacaaagtcaccgctgcgatgcccgtaataagcagtgtgatttcgattaatcgatgtgtgccgtttatcggcttctgctttttaacagcctttggaaaatgaagaactttgacggcaaatacttgaaacataaggctgagcaaaataaatacggctgaaaaaatcagtaactgaatgaaatccatcgtctcctcctaaaaatgtcactcgtttcatatgggtgagggccttgtaagtttcagcattctataagacattaggctgagtttaatggtaaaagactcaaaaaagacccctttcgaaaggggtctttttgactagtttcttctattataatggttcctgcttcaggtcgggcggacaagcgtatatgtcttcccgagtctgacgtattcattccccgcgagccttgccgcaggcttcagctcatctgtccgtatgtagcctttatcggcgtcatatacttggtcattcaaatgaaaacaaacgactctgccgatgatgaggtctgtcgtcgtttctccgctgtcattttgaaacggaagatggcgttcgagtatacattcaaacctgacttttgcttcttttataccgggaacgctgatgcaggcgctgtctgtcacagaaaggtctgtcatgccaagttcactgacatcaggatcaagccttgccgccgttttgttaatgtcttcaataatggactcatcactgacgtgcaccacgaattcccgatgagcgattgcgtttctcgcggtgtctttctgccgtccgtccgcgcggctgacagagatggccagaagcggcggttctgcggagacaacgttatagaaactgaagggcgccgcgtttacggcgccgttgatggatgaccgcgtcgtgacaaatgcgatcggccggggaacgactgtgcccgaaagcaatttgtaggtgtcttttgcgttcagttcgtctgctcgtaagatatgcatgatttcggccgcctttctttatcgtatgacctgattatacagaaagaaaattcggaaacacaacaaaagaaaaccggctgcatatcttatcacgtggcatatatctgattgaggaaaaaggcttccgtttagccggcagcctatttacaaatggcgttacttgtagtttttctttacaacccagatgttcccgtctttccagtactctgttttgctgcagtaatcgtcttttttgcaagggtcttttttatgaggacggtaaggttttttctgcgtgcgttttttcttgcggcggcatgattttttgtggctgcgagattttttgtgagaacgggattttttatgactgcgagattttttgtgagagcggcgcgattttttatggctgcgagattttttgtgagaacgggattttttatgactgcgagattttttgtgagaacgggattttttatggctgcgagattttttgtgagagcggcacgattttttatggctgcgagattttttgtgagagcggcacgattttttatgactgcgagattttttgtgagaacgggattttttatggctgcgagattttctcttcttactgctttttggttcttggtacaaataatcttccaatccctcggtgcttgcggactttactgcttcttcgatatcagaatgggaatagtggcccattttgaaacctcctcatgatatatgttttaaggatgcgatccttactaccacatagtacgcatgaatgaaaaaagtgtatgtgtgattcgctgagttttatataaatagcacagcctaaattaatacagggagggttactgatgaaagaccaatcaacattgcctctataccagctgtttattcacccgaaagacttaatggagctgaaaaaagacatttgggatgatgatccggtgcccgcggtgctgagagtgaatcaaaaacggcttgacattgatctggcgtaccgcggctctcatataagagattttaagaaaaaatcgtatcacatcgctttttattcgccgaaaacatttcgcagggcgaaagagatacatttaaacgctgaatacaaagatccgtcgatgatgcggaataagctgtctctcgatttcttcgcggagcttgggacgctgtcaccaaaggcgaatttcgtaaccctgcaaatcaatggcagacatgagggggtgtatcttgagctggagtcagtggatgaatattttctggcgaaacggaatttggcggacggggctgttttttacgcggttgatgacgacgccaatttctcccttgtcagtgatctggagcgggatacgaaaacatcgctcgaacttggttatgaaaagaaaacgggaacgaaagaagacgatttatacttgcaggacatgatctataaaattaataccgttccgaagtcagagttcaagggggagatcgtcaaacacttggacgccgataagtatttgcggtggcttgcgggcatcgtgtttacctcaaactacgatggatttgttcataattacgctttgtaccggaatcatgaaacgggactttttgaagtcattccgtgggattacgatgcgacgtggggaagagacattcacggtgatcggatggaggccgattatgtcagaatacaagggtttaataccttgactgcaaggcttctggatgaaccgtatttccgcaaagcgtacaaacagcttttggaagaaacgcttcagacccggtttaccattgaacatatgaagccgaaggtcatgtcactgtatgagcagatcaggccgcatgtcgcaaaggatccttataagaaagaggagattgattgctttgaccgggagcctgatgtgatttgcgaatacattaaggagcggtccgccttcatcagcagtgagttagagcggtggaatatctgatttggaaatgaagaaagattttttacaaataggctggtgaatcagttcccgaaaataatcgtgatacgtatatatgcattatgctttttacattatgagaaaaatgactaggaggacaatagatgaaacgcaatacgaagcggcatcggtctgatgacaactttttgcatgcgatggaaggaaaagtaattactgtctaccggggaggcccggagtccaagacagggagattagcagacattcaatcggattatatcgctcttcaagttgataataaaatcgtttattatcaatggaaacacgtgaaaagtgtgacggaaaatacgagtgaaaccgtatcgccggccgaagcggcagaatgtgaaaaagctgatgattttcaagatctgatcagccggatgaccaatcgcacggtgcaattgaatcagggaggtccggaatcgaaaagaggaaagcttcacgaaacaggggatgattttctcgtgctggaaacagaagatgacggaatcgtatattttaacgccgatcatgtcaaaagcatcagcgcggaacaagaagaggacggccaggaggaggagcgcccggaatttgaaatggctgatgattttcacggcatatttaaacgcctgatccacaaatgggtatccatcaaccgcggaggtcctgaagccgttgaaggtatacttgtggataattccgacggccactacactcttgtgaaagataaagaagtgctgcggatctatccttttcatatcaagagcatcagcgaaggggcaaaaggagcagccaaaaaagaggagaataaagacgacgagaataaaggcgggaaagagagcgccgaagaagaaaagtcacatgaagaagaatctcgcgaagagcagcgtacttcctctaaaaagtcgaaaagatcgtcaagatccgttcgatcctcaaaacgggaggaagagaactcttatagctacgccactgtattaaggacaatagattataggtggaaacacggccgtaaatgattggaaagattgtccgtaaacgcgggagaggggggaatgaaatggctggattaagcagatttcttgataaacaagtcgatattgagatatcggggaatacgacattttcaggaactcttttggatatcggtcaggatatcattgtgattcatgacggccggacgtttctttatattccgctgctgcatcttcagaggatgacattgacgctcccggacgaagagaataaagaaccgtacgcaagaaaaaaaagtccgcatcccgaaaaacaggaacattccttttcttaccggaataccctccagcatataaaaggcagatttacagaaattttcgttacgggagaccgttccattcatgggtatgtgacaagtgttttaaatgattattttgttttcttctctccggtttataagactcttttcatctcgatgcatcatttgaaatggctgacaccctattccgatgagcagacgccgtatacattaaacagttcagagctgccggttgttcccgctaatgtgccccttgtccggaattttgaggagcaattaaaaagatatgtcgggaagctgattattctggatttaggagatataccgaataaagtggggctgttacaggacgtctcagataatattcttgaattgaccaatgcagacggggatactgtcttttggaaattgaatcatttaaaaaccatgcacctgccataaatgataaaactgcctctcttatacagcaggcagttttttttcatagctaaaggtaaatccagctgatccaaacatataaaacggtaatggtaaacacgacggtgagagggacaacgacaatggtcgttttgatatattctgaccaagaaactttttcgccgtgctgtctgatgatatgcatccagatcagtgtggctaatgtcccgatcggcagaagcaatgatccgatatcactgccgataatattagccagataaatgatttttacggttaatgggtcgatggacatttcagttaatgtcaaagtgctgatcattaaggcgggatggttattgaacaaattagagaggacggatgtagcaatgcccataatagatgcagcgtgggcaatgctttgtgagacataaggctcaatagactgaacaagcaatgccgtcagtccgatattatgcagtccgtaaatgataatgtacatcgtgaaggcaaaaataaagatatgccaaggcgctttccttaataagtccgccggtccgatttttaaataaaaccatctccagcaaagcaggatgactgaactgatgacagccacgagcgaaacggatatgccgttgtaagaagctgcaaacagactgatccggacaaacaatacaaataccaaaacacaaaacatgatgttcgtacggctgtttttttgggacaagtctggcggaggctgaagcggatgatatcgtttgtgttccagcgattcaaaatgaaccggaatatcggggagctgtttcggcaaacggcggtagaaaacggcaaacagcagaaaggccataaacaccagtcccagcgtgccggggataaacatcatattggtgtacaaataaaggtccatgcctatcattttgagagaaattaaattgacgatattactgacgccgatcggggtgcttgccgccgtcgcaattaatacgccgcttattaaatacggtgttttctgatgtcttttaagtccgagatattgtaagaccaatagtaaaataggagtggtgattaagacgctgccgtcattattcagaaagagcgtcattgaaaaacagagcaggttggtcagccaaaaaagccggatgcctgatcccttggcgcggtgaagcagtttggccgccgcccagttaaaaaaaccgaagctttccagcgcgatcgccattatcattgtggagataatggttattgatgctccggtgacttttgaccctatatcccccaaatcatgaaaggaaacggttccgcataacaaaacgagaatggcgcccagcgacgccggaacggcttcatttaatcccccgggtctccaaaatataaaaataatggtcacaaagaaagaaatcagggtcaaaatgacggtaatatgtgtaatgtgttctgcctccttttcgatgggtcattgccgccccgttatttttatccctcctgatcagttgtactgtatgtatacgggtacaggtcgtaaggtgtactgagcgtttctaccaatttagtaaaaatccataaaagcacaaaaaaaagaggctgctttcggcggccctcttttttatgcattttccttatccgcctgcaataaagcctggcgcttattcataatatccagaaaatgtttcaggatcggattttgattatccttgcggtaggcaatgacccattcggcagtgagctgcgcctgattaatgccgcggtaggcgacttcgagattaaacagctttttagcagaagaaggcacgaaggttacaccgataccggcactaaccaatccgatcaccatttgatactccgtcgcttcctgaacgattttcggtttgaagcccgcctgctcgcagtagtttacaaactccaggtataaagtcggccatgtttctttcgacagtgtgataatcggttcattttttaaatcctgaatgtcgattgtctgtttagcggtaagcgggtgctgcttcggcaaagccagaatgcacgggctgctctgcaccttttccatatgtaacgcggaatgttgtaaaggcggatgaaggatgccgatatcaatgttccccttcagaagttcttcctgctgtctgaaagaagaaatttcacgcagatcaagcttgacggaggggaatttttcgcggaattcccgaatgatcggcggcagaaattcatatgtggccgagccgacaaaaccgacgacaaggcggccgagctctccccgcgccgttctctgcgccatttcaatcgctttgtctatttcttcgatcgcgtttctgctgtgttttaaaaaactttctccggcagctgaaagctctacaacccgtttcgtgcgctttaataaggtcacgccgacttccttctcaagctgtttgatctgctggctgagaggcggctgtgtcatatttaaccgaagcgcagctttgccgaaatgaagttcttcggcaacggcaataaagtattgaagatggcgaagctccatccttatccattcctttctctttgttaattattcgtgaaacatattaatcatacggcgaattgatattggaggtcaatttccaaagagtgtatagtgaataatatcacaaattacttaaaattttatatttaatatgcataataaggagtgagggtgttggcaaaagcaacaaatgaactaaaaacctctgaaaaaaatcggggggcggagcttgttgttgattgcttagtggagcaaggtgtcacacatgtttttggcattccgggtgcaaaaattgatgcagtatttgatgcgttaaaagataaaggacctgaactggttttatgccgtcacgaacagaacgctgcatttatggctgcggctgtcggaagactgactggaaaaccaggcgtttgtctcgttacttcaggcccgggggcatccaacttggcgaccggcttgttaacggctaatacagaaggtgatccggtagtggcgctggcgggtaacgtaattcgcgcagaccggttaaaacggacacaccaatcattggacaatgcggcgctatttcagccgattacaaaatacagtgtagaagtacaggaaacagggaatataccagaagcggtaacaaacgccttcagggcagcgtcagcaggtcaggcaggcgcggcttttgtgagctttccgcaggatgttgtgaatgaaatcacaaatgtgaaaaacgtacgcagcgtgccggcgccgaaacaaggccctgcaccggaagaggcggtcagcgcggctatcgcgaaaatccagacggcgaaacttcccgttctgttagtcggtatgaaaggcggaagaccggaagcggtaaaacaaatccgcaaactgcttgccaaaacaaaactgcctttcgtagaaacgtaccaaggggccggcacattgtccagagagctggaagaccaatatttcggccggatcggactgttccgcaaccagccgggcgatcttctgcttgaacaggcggatgtcgtattaacgatcggttatgatccgattgaatacgatccgaagttctggaacgtaaacggtgaccgtgctattatccatcttgacgaaatccaggccgatatcgatcatgcctatcagccggaattagaattattaggcgatatccccgctacggttaaacaaattgaacacgacgctgtgacatttgatatgggcagccgtgaaaaagaagtgctgagcgagttaaaacagatgctcacagacagcgagaaggcgccaagcgatcataaatccgacagagtgcatcctctgcaaatcgtccaagaactgcgcaatgcaattgatgacgacgtaaccgtcacttgcgatatcggttctcacgcgatctggatgtcccgctacttccgcgcttatgagccgctgaaactgttgatcagcaacggcatgcagacattgggcgtagcgcttccttgggcgattgccgccacattggtgaatccgggtgaaaaagtcgtatccgtttcaggagacggaggattcctgttctctgcaatggaattggaaacggcagtccgcttaaaagcgccgatcgttcaccttgtatggaatgacagcacatatgatatggtcgcattccagcaaatgaaaaaatataaccgtacatcatgcgtagatttcggaaacattgacatcgtaaaatatgcagaaagcttcggcgccaccggcttgcgcgttgagtcaccggaacagctggcagacgtgctgcaaaaaggcttgaacacagaaggccctgtcatcattgacattcctgtcgattacagtgacaatgtccatttatcaagcgacatgcttccgaagcaattcaaagaaaaaatgaaagcaaaagctctctagcactctgcgcaccatgacctgttttctaaaacagcccaatttaaaaggagtgaagggaatatgaaaaacgcaagcgacatccatatgatgagccgcggagaaaaaggctcacctgaggatcaaatctatcaagtatccaccatgacatctctgctggacggagtgtatgacggagattttgatatggctgacattccgaagttcggtgatttcgggatcggcacgttcaataaactggacggcgaattaatcggatttgacggcgaattttaccgtctgcgcggcgacggaacggctacgcctgttaaaggcggagacctgtcaccattctgctcattcacatttttcacgccggacatgacgcatacgatcgacggcgaaatgacccgtgaagaattcgagcaggaaatcgccagccttctgcctagtaaaaacttattttatgcgatccgtttagacggcgtatttaaaaaggtgcagacaagaacggtagaacgccaggagaaaccgtacgttccgatgattgaagcggtgaaaacacagcctgtgttcaactttgacgacattcagggtacaatcgccggcttctggacgccgggttacgcaaacggcatcgctgtttccggatatcacctgcacttcattgatgaaggacgcaattccgggggacacgtgtttgactatgtcattaaagattgtaaagtgaccatttctcaaaaaatgaatatgaacctcaagcttccgaatacggcggactttttcaacgcaaatttagataatccgaattttgcgaaggatattgaaacaaccgaaggaagcccggaataaaataaaaaagaaagcctcatttttctcgggggctttctttttatttggctgaaccggcaaagattaggtaaaatacagtcaaaagggaaaggtgtggtagctgtgaaagtattggtattagcggttcatcctgacatggacaactcagcggtcaataaggcgtggacagaagaattaaaaaatcatgatgacatcacggttcgtgagctttataaagaatatccggacgggaaaatagatggggaaaaggaacggcagctgtgtgaacagtatgaccggatcgtatttcaattcccgctgtactggtacagtgcgcctccgcttttaaaaacatggatggatcatgtgctggcgtatggctgggcttacggttccaaaggaaaggcgctgcacggcaaagaattgctgctggctgtttctgtaggtgccggagaggatgcatatcaggcaggcgggtccaaccatttttcactgagcgagctcttaaggccgtttcaggcaatggctaattttacgggaatgacctatttgccggctttcgcgatgtacggggttagcagcgccgatgctgcggctatccgtgacaacgccaaacgcctggcggattacataaagaagccattttagagtcgtatgcattcatcttcatccgacaatatttcctgagaaatatttcgaaccttagacgtttctgactgctcaagaaagaaaaaacggatttcgcgctgaatttgcgaaatccgttttgatattatgtcagtttttgcagatcttttgtgctgatatatcccgttgcgcccccgtaatcgacaagcgcccagccgaaatcaatgccgccgccggctgtctttttccatccgaggaaagaaacgctcgtgtttttggcaagggaagctgtgaccgcttgtttgtctgtatatacttttgtttttgccgtcgtttttacggttgttgcttctttaacaatataatgagtagatacaaatcctgtttttccgtttttataatgtacttttgcccagtcagcgttctggaatgaaacgatctttaagctgtcgcctaaatgaagggtatcagctctcggactggctgctgatgcttttgttctcacgttcaatgcttccgcggaaacgagataagagtcaagcgggtagctgtacagatcgtcaattttgaccgcttcttgcgcgtgtgtctcgggaagaggcgttattccggcagctgaagccgctgatattcccgctgcaagggtcagaatggatgccgctttggctgttttcttcatctgtatctctccttttacttcatcctttcacgttttaccggaagtctaaacatcagccggttatttttgcgtttgaagtttcaatggagcggaaatggtttttttgactttttttcctttgagcacctgctccgccgcttcggccgccagttttccgatcagctccggctgctgggcgaccgtggctgtcagcttcccgcttttaatggaagaaatcgcatctttatttccgtcgaaaccgacgaccaaaatgtgtttgcccgagctgttaatcgcttcgagcgccccgagtgccatttcatcattatgggcgaacacggctttgatatccgggtgtccctgcagcaggttttccatgacggtcaatccttttgtgcggtcaaaatctgccgcttgctttgttacgacatccagctttttgtcggcaatatgatgaaagcccgttccgcgttcccgtgtcgcggatgcgcccggcaccccttgcaattcagccactttggcgccttttccgagctgatcggcgaggtagtcagccgccatttctcctcctttgacattgtcagaggcgacaagcgtttcgactttgccgtgttcggctgaacgatccagcgcaatgacgggaatgccgagggaatttgccgattcgactgctgttgaaatcgctgatgaatcggtcggattgatcagcagcgcatcgactccctgctggatcaaatcttctacgtcatttgactgtttagatgaatcattttgggcatcgacaataatgaccttcatgccccgttttttggcttcctttacaacgccttcttttaatgaaacgaagaacggattgtttaatgtggagacggagagcccgatagtgaattcttttttatgttttgtgtttgacggttttgcccattgcggcggttcaagtgaacaggcggacagcaaaaacagtgataatgccgcgatcgtgatgatggctttcttcataatggtcctcctactatgccgattttttgcggtccagcagcaccgcgattaaaatgacgattcctttgacgacgagctgataaaacgatgatacgccgagaaggttcaagccgttgttcagcgtaccgataatcaaaaccccgatcagcgtaccgatgatgcgccctcgaccgccggacaggctcgttccgccgagaacgaccgctgcgatggcgtccagctcgtatgattctccggccgtcggctgtgcggaatttaagcgtgatgtcagaatcgctcccgccagcgccgataataaacctgtcagagaatagatcatgatcttgatgcggggcactttgattcccgatatcagcgccgctttctcattgccgccgatggcgtatgtccggcggccgaacggtgttttgtgcagaagaacccacagggccgcaaatgcaatcagcatcgtaatggcaggtacggggatgccgagaaaataaccgcgcccgaataattgaaatgcgtaatttgaaccgagccccgtaatcggatttccgtccgtatagacgagggtcagtccgcgaaagacggtcattgtcgccaaagtggcgatgaacggcgccatttttccttttgtgattaataatccgtttatcatgccgagtacggcgccgatcacgcagccgatgatgacggctaagatcgggtcgatgcctgagaccatcatacctgcgaccactgcgctcgataaggcgaggatggctccgacagagagatcaatgcctcccgttaaaatgacaaacgtcattccgaatgcaatcagagcgttaatcgcaacctgccgaagaagattgagaatattgagaggttcaagaaaactcgggtttaaaacggaaacgatcagcacaagaatcagtaagccgagaaacggaccgagtttttgcgtgaaggtatgaatggaaaatcgcttttgttcagttgatgttattggttcagttttcatactgctgccctcccgtggcaagtgtcatgatgtgttcttgtgttgcatctgccgcattgatttctccgctgatgcgcccttcgtggacgacgatgattctgtcactcatgccgagaatttccggcagctcggaagacaccatgatgatggcgactccgcgatcggtcagttcattcattaatgaatagatttcccttttcgcgcctacgtcgacgcctcttgtcggttcatcaaggatgaggactttcgggccgattccgatccatttggcgatgacgactttttgctgatttcctcctgataaatgccgggcggcggtttccggagatgcagtcttaatggtcagacgcttgatgagcagctcaacgaactccgcctcgcgttttcggtcaatgatgcctttcggagagaagctggtcaggttcggcaatgagatattttcacgaatggacgtatccagcagcagcccttcatctttgcggttctccgtaatcaggccgagtcccttgcggatggcatcgtacggaccccgaatgccggtttttcggccggaaatccagacctctccggaatcgagccggtcaattccgaacagcgccctcatgatttctgtccgtccggcacccattaagccggaaacgccgaggatttctccggcgctcacatggaaactgatctgtgaaaatcttcctttttttgaggcgtttttcacttcgagcaccttatcgccgagtgacggcgtgcgggtcggataccgatcggtcagctcccgcccgaccatttttttgaccacttcatcaaaatgagtatctttcatatgcgccgtatcgacagtgaggccgtcccgcataatggtgatccggtcgcaaattgaaaatatctcttccattcggtgagaaatatagacaatggatacgccgtcccgctttaacgccgtcatcacgtcaaacagtttgctgatttcccgttcggtcagcgccgcggtcggttcgtccataataatgacttcggcgtttgtcatcagcgctttggcaatctcaatcatttgctgctggccgacggaacattgtccggcttcccggtcaagaggaagagagactcccagtttttcaagctgtgattttgctagcgctttcattttcttcgtttccaaaacgccgaacgccgtcgtcagctctttgccgataaaaagattttcaagcaccgtcatgtccggccatatattcagttcctgatggataaaggcgattccgtgcttttcggcttcctttggattggagaaattcatatttgttccgtttatcgtaatgtttcccttgtcgagccggtagagcccggtgagcagattcattaacgtcgatttgcccgctccgttttctcccattaaagcgtggatttctcccggcagaagctcaaatgagacgccggatagcacttggtttttgccgaatgctttatgaatgtctgtcatgccgatgtgcatgctggatcccttctttctagaaaatcacacccgcctgcaggatgcagttggcgtatggtgtcatttcacccgtccggatgacggcttttgctttctgtgtgagccgtttgaattccgagtgggacatgtactcgatcgtctgcgctgagaaatggctttctatgaaacttgcattctcaggattttcgtctttgatctcggaggcggccatcaccttttcgacggccatctccccggctaccaggctggtcacatcccgaaaggcgggaatgcccgccgttaaggacaaatcaattttagggacgccgtcagggacggggagacccgcatcggcgatcgcgatgaggtctgtatgcccgagatcggctaatactttggcaatgtggctgtttaacattccgtgttttttcatgacagcagctcctcaacttcttttctgaccggcatcccgccttgggcgccgaagtgctgcacggacagggaggcggcgcggttggcgaacaggagcgcttgctcgatgtcccgtccttccgcgagcgcgacggcaagtgccgcattaaaggtatcgccggcacccgtcgtgtcgaccgcttctgcagggaagccgggaacaagccgttccgcggtgccgtctgagtagcgtacgccttgttttccttcggtaatgaacagtttgccgggatagccggcgagcgcttcttctttcgtccggtcaggaaataaaatggatgcttcatgttcgttcggcgtaagatatgcggcattctcaatcgtcgattgtttcagcgggcgggccggcgcgggattcaggataaccggaatttggtgcgcgcggcagtagctgcacacttcttcaacagtttcttcaggaatctcctgctggatcagcacgatatcaatgccgggaagtttttccagcgcacttttggcataatcgggtgagatgtcatcgtttgcgccttttacgacgacgatgctgttgtctccttctgcgagcacaatatgagccgttccgctttttttatgtgtaaccgtttccatatagtccgtattgacaccgtttgccttcaggttttcaataatcgcttttccgtagctgtcactgccagcttttcctaccatatatacgtttgcgcccagacgggaagcggctacggcctggtttgcgccttttcccccgggcacggtttgaaagtctgtgcccagtacggtttctccggctttcggacgccgttcggatgtgacgaccagatccatagaacagcttccgataacacaaatttcactcatggtgatcatcctttctcgtcgtttgtcttcttatataagtcacgggcagttgaatggccgtctctttcggcggctctttctttatcaattgcagcagcaggtttgccgcttgttttcccatctcatatgcaggctggcggatggttgaaagcggcggaaacaaaagcctgctctgcggaatatcgtcgtatccgatgatctgaatctcctccggaacttttttgccgagccgcagcgcctcatggaggacggcagccgccgcaatatcgttgctggcaatgactccgtcggtttcggggtatgctgcaaacaatttttctgctaaaacggcggcatccttgatagaaaatgaagcggcggagatgacattgaactgcgcgcccgctttatacagcacatcaagtgcgccgttaaaacgttcctgagcggtcggaaggtggcctgggcctttgacaagcgtgatgcttgtgcttttgccgcgaagcatttcctcagccgcccgttttccgcctgcccgcccgtcactgaatacggatggggcgccttcttttgtccggtccagaaatacgaccgggtaaaggctgccgctgtattcgggaaggtcggggtaatgggtggccgccaaaataccggcaacttgattttgtttaaatgtttgcaggtagtcgagttctttttccaattcttcatcgctgttgccgatgatcagccggtatccttcccgctgcagctcgtcttcagcgccgcgggcaagctgcgggaaaaaggggttcgtaatatccggaagcaaaagcccgaccagtctggattctcttttataaagagagcgggcaacttcattcggataataattcagcttctccatggcaagcatgaccttcgttcgtgtatcttcatggacgtagccgttgtcattgaggacacgcgagaccgtggcaacagagacgccggcagcgcctgcgacatctttaatcgttaccaacaaacactcccccttcatttatgtaaccgtttacacaaaaagagtaccacgaatcatttcggttggcaacaaaaaaagagaccggggtctcttttagttcacgatgccgatttgcgagatattcactttgatatcagggattatctcgatggaaggatagacctcacgccaattgagccgcttgccccgctcataataatgggtttgatatttccggccgatgccgaggatatccgagttgtgctcctgaatatggctgatcaccgatctggcctggctgttcaaatttgctgatgcttgtttgttcatttggtcgattgccgtataagaattcagtttgtccttcggatattccaagacgcgtgcattcagctttaaacggattttcacttttatatgctgcggatctgtatctataaatacaatctttcgcgtggcatccgtgatgccgagagaaagataattttcaatatccattttgtatttgtcccacagcttcagattaatattagccgatttattaaattgcccgcttaaaagggtcaggagggtcgaatcctgaccgagcacctcagtcactttccgctgtccgctgaacagggcagaaccctctacctttatcgtctgtccgttaatcgataaataaggaagggcgaaatccttatcagccgtcagcatgcttgaacggatggattgcaaattttccatgctgatatttgattccgcattagcgcttgttaataaattcgttaaatacttgctgacgatcaatttctgccggacgatcagcttcagcacttcaatcgcctcgccgtcttttacaaccgccggatgagcgagaagcggacttttcggatctctgtaaaagacatcgagataaggaaaaagcggtttttccgccattttctcaccgattaataagactctttgcttggacgtgtcaatgcgctggtcgacaagcttatccaattgaaaccgcgcttcacggatggtgtgtccggaagcgctgagcaccgtcgtaatgaatgagccgcccgtttcctgttccgcctgggaggactgaaccttccgataggtaatgccgattttatttttaccgtcatgatcaacatcaaggcttgcggtcagcacgagagaaatatctttcaacaaattttgatcccagcagccggcaagtgtcaggcttgcgcacatgagactgataagaaccgcttttttaatgcgcatggcggacaccctttttgcgtacaaggacaatcaataccataaacaacggaaacaaatacacaaacacaatatcggaaatgcggaaaaactgatccagctgctgtatcgttttatctgtgcttgtggcccaaatagacagaaggaagacgagcagggccagcggataaacaaaccggctgtgatctttttgattgaacagcttggcgatgccggtgcttgccaagtaaaacacgttggccagcgttgaaaagacggtcacgaaccaaaacgtcaaaaagagcagatccgtccgttcgataattctgaatgaaacggtttttaacaggtacagcacaggctccgggatcatttttatttcttcggggctgatggtgacaaagcaagtaagagtgatatacaggtaataaaggataatcaagccgtttgaaatcgtcagtattttgtagcgctggctgacggtgcagttgataaggggcccgatcacaagcgccgcctgaaagccggtaatgctgacaagtgtttgctgcaccccggtaagcatgtcttttgcggttccgtgaaaaatcggcataatgtatgtgatatcggcttttcccagtgtgtataaaagcggcagagagatcagcagcaaaaacggcgttaaaataaagctgaacctcgcgatcgcattcagcggggcttgggcgatatagacagaaccgaggatcagcattaagctgatcacccaattcggagtctgagggagcacccagatatccaataaccgtgtaaatacagaaagaatgagcgtgcagagaaacgcgaaatataaaatatacagcacctgcacccctttgccggcaagtgttccgaacacctcctccagcatttcatacaggttcagcttcggaaaccggtgaaataatatcatatacaggctgaaggtaagctggacgagcaatccggtaagcagaatggaaatccatccgctgcttcccgatttcatcatcagtaaatggggcagcgccaaaatgccgatgctgatctgcgtctgattaatgaaaaacacgccttgaagccggctgatttttttaggcttcatcttttctccacccccgaacatgttttatctgctttgaatcttgcggtctcaaataaaaaggccttcttttaataaaccaggccggcagccggataaatgcatcctttaagtcactgaaatgaaacggcgtcagagatgataaatacggaacgccgagggattcaagcttgcacaggttcatcagaataagtccgaagccgaatgcgatgccgataaaaccgaacgaggatgccagaaacataagcggaaatctgagcgttcgaatggacgtgctcatttcatatgaaggaagcacaaaagaagaaacggccgtaacggccacgacgataatcatcatattagaaatgagtcccgcctgaacgactgcgtcaccgatcacgagaccgccgacaatgccgatcgtctgactgatcggtttcggcagcctgataccggcttcgcggatcagctcaatcgtaatctccataatcatggcctctatcagcggagggaagggaatatcaacaatcgaatttttcatggtgataatcaaatcgttgggaatgacttcaaaatgaaacgcaatcagcgcgatataaaaagcgggcagtgtaatcgcgatcataaaggcgaaaaatctcagcactctcaaaaaactggcggaaatccacctcgtgctgtagtcatccggcgattgaaaaaaggaaaagaacgtgatcggcgcaatcaaggccgacgggctgccatccatcatgatcagcacacagccttccatcacgcatgcttttgctttatccggccgttccgtatgaacgatctgcggaaaaatggaaaacgaattatcttctatcgactcctcgataattccgggcgcaagcacgctgtctatacgcaggtatgacaggcgccgcttcacttcctccacaatctccggattggcgatattctcaacaaagataaccgcaacctttgatttggctctttccccgatatccatataatgaacggagagatggcggtcctgtatgtgaaaccgcagctgatgaatgttcgtttccaaactttccacaaacccgtcatgggcgccgcggacgatactttcagattcgggttccataatggaacgcagcggattctgcccgacggaaaacagcttcgctttccttgatgcatcgctgagaaaaacaacctggcctgccaaaatcccgtcaatgagttttctggtttcatccgtttccgcactgctgacggcattcatcgtttcctcaagcggaccgttctgcagggtgtcgcttaacagaaactcattcagcttctgttcttctatcatttgttcaatataaaagaaagcggtatgacggtcctgcagtttgatccttcgtattttaaaatcaccgcaaacacacatcagctcctgcatttcccgtacagccgattcaaaatcgccggaaatccgcttgttttgtttatccgcagacatcagaccgcctcctttcccggttatttgtagttttcagcgggtattccttttttatgcattttataaaatagaggagtttctcgacgttttaccaagaacttcacaattatggatgaatatttcttgaacgaatataaagatttattaaaattatttcaaaagagtgataaatgtcctgtaaatgctttaaaaggagataggctttccgcatataaaatgtgtatttcttgtaaacactccggacccgtctttttctgtcacgtaccagtcattccgctagttattttggaatgggactgaaagcaggatacgggggaaaaatgaatgactttaagaccttatccttaacaaaacaggcagtctgcacacagcggacatagagtcccgaaacgtatgcgcagtgcggaaaacgctgatataacaggctgtaaaagatggattatcattacatctttttcttccggaacgcgtatagtcccattggtccaaatgaatttatgtgcggaaatgtaaacgcatacatttttcttttaaaaaattgaagtaaggtttaagtcctgcctattcccaaaaaaagcaattcgataataggaagaatagcgtcactaatagagaagtttggctcagtgaaagcgggaagattatgttacataatgccgattgagaattcatagtgaagctatatactgatgaatgaatttatcaatacagaaggagatgtcaaaaatcaatgtggttactcattatagcctgtgctgccgtactaatcatcggaatcattgaaaaaaggcggcatcagaagaatatcgatgctctgccagtacgcgtcaatattaatggtatccgcggaaagtcaaccgtaacgaggctgacgaccggaatactgatggaggcgggctacaaaacagtcggaaaaacgacgggaacagatgcaaggatgatctattgggatacacctgaggagaaaccgatcaaacggaaaccgcagggcccgaatatcggcgagcaaaaagaagtaatgaaggaaaccgtagaacggggcgccaatgccattgtcagtgaatgtatggcagtaaacccggattatcagattatctttcaggaagaactccttcaagccaacatcggcgtcatcgtgaatgtgcttgaagaccatatggatgtcatggggccgacgcttgatgagattgctgaagcttttaccgcgacgataccgtataacggtcaccttgtcattacagacagtgaatacacagacttctttaaagaaaaagccgcagagcggaataccgaggtcattattgcggataactctaaaattacagatgaataccttcgaaaatttgaatatatggtctttcctgataacgcttccctggcgctcggcgttgcccaggctcttgggatagatgaagaaacggcgtttaaaggaatgctgaacgcgccgcctgatcctggcgccatgagaatcctgccgctgctcagcacgaaggagcccggtcatttcgtaaacggctttgccgcaaatgatgcatcttctactttaaatatatggaaacgtgtaaaggaaatcggctacccgacagatgaaccgatcgtcatcatgaactgccgcgccgaccgtgtggacagaacgattcagttcgcaaacgacgtgcttccgtacattaaaacgaaggaactcatactcatcggcgagacgacagaaccgatcgtcagagcttatgaagaaggcaagattcctgccgatacactgcacgatctggaatataaatcaacagacgaaatcatggacgtgctgaaaacaagaatgcaaaaccgtgtcatatatggcgtcggcaatatccacggttcagcggaaccattaattgaaaaaatccaagagtataaggtgaaacagctcgttagctaggaggaaaaggataaatgttcggatcagatttatacatttcacttattttaggcgtgttaatcagtttaattttcgcggaaaaaacaggtatcgtacctgccggtttagttgtgccgggttatttagggctcgtttttaaccagccggtctttattttactcgtactgctggtgagtcttcttacatacgtgatcgtcaaatacggtttatccagatttatgatattgtacggacgcagaaaattcgcagctatgctgataacgggaatctgcttaaaaatcgcccttgattttctttacccgatcgtaccgtttgagatatcagaattccgcggaatcggtatcatcgtaccgggtctgatcgccaataccattcagaaacagggattaacgattactttcgccagcacgctgttcttaagcggcgcaacttttgccattatgtttgcttactacttaatctaatgtaaggtgtgtcaaacgatgaaaaaacaattaagctttcaagaaaaactgctgaagctgaccaaacagcagaaaaagaagaccaatcttcacgtttttatcgcgctgccaatcgtcttttgcctgatgttcgtctgcatcctgacagggaaggcggaaacgccgagtgtgaaaagaaatgccgatgaccttgtatcagcctcatttgtcggagatattatgatgggccggaatgtcgagaaagtgacaaagcataaaggcacggagagtgtcttccgttatgcaaagccattcttcgaatcatccgactatgtgtcagggaactttgaaaacccggttacatataaaaagaactacaaagaagcagaaaaaaatatccaccttcagtcaaacaaagatgccgtaaaagtattgaaggacatgaatttcacagttctcacggcagccaacaaccatgcgatggattacggccctcaaggaatgcgggatacggttgaagagttttcaaagcaaaatcttgaacttgtcggagcaggcctcacgctgaaggaagccgagcagaacatttcttatcaagatgtaaacggaatcaaaatcgcaacactgggtttcactgatgtttccggaaaaggttttgcagctaaacgaaatgcgccgggtgtgcttccggccgatccagagctgtttattccgatgatttctaaagccaaaaagaaagccgatcttgtcattgttcaaacacactggggacaggaatacgataatgatccgaatgacagacagcgccaattggcaagagcaatgtccgatgccggagcggatattatcgtgggacaccatccgcacgtgctggaaccgatcgaaatgtaccacggcaccgttattttctacagcctgggcaacttcgtattcgaccaggggtggacaagaacgagagacacggcgcttgttcaatatcatctccagaaaaacggcacgggacgctttgaagtcacgccgatgaacattcatgaagcaacgcctgcaccggttaaaaaaggcagcatcaatcataaaacgatcgtacgtgaactgacgaaagaatcgaatttcaagtggagcgtcaaggatggaaaattaacgtttgatgtggatcacagcgatatcttaaaaaagaaagcggagtgaaaaacaaatgaaaatcattaaagcgggatggccgtttgccgcgatcattatggtatttatgtttatgtctgcgtttaaatacaatgatcagctcacagatcaggaaaaacaaaaaattgacacggaaatgcaaaaaattcagcaagaggacacagcgggcgcaaaataagcgcatgattccgcttgccggcatattgtttgttccgaatccagtaaagaatgcccatatcgggcattctttttttgtgtgctctcctaaacatttgttaaaagttaccgatgtaaaaactactaaaaatgaggagagtgaatagaaaacatgctcacaagctggaggaagtacatccttgccggccttatgatttgtcttgtggcacctgcagtaacgagaacggaaattgccgaagcggattctcaagtttctgtcctgatcgtttcagacgcgcaaaaacttgtcggaaataaatatgtttacggaggcgaagagcctgaggacggttttgacccgtccggattgatgcattatcttttcagcaggcagaacatccatctgccgagaacggtcagtgatcaatggaaagtcggagccgccgtcaaagaaaatgaccttttaccgggagatcttgtgtttttcaaaaagtcagattcaacacaaaacgcggccgtccatgacggtctgtatatcggaaacggagagatgatacacagttctccgtcagaaggcgtaaccgtcacacgctttcaaaaaagcagttattggatgaatttatatcttggcgcaaagcggatgacaaaagatccggaactggctgatgatccgatcgttcaggaggcagcccgttacctcgacattccgtatgtattcggcggaagcacgcctgaggcgggattcgactgttcggggctggtccaatatgtttttgaaaacaagcttcacatttacctgccgagatctgcggaacagcagtggctggtcggtgagaaaatcaaactgagcgacataaagcccggggacgtgatttatttcagcgatacgtataaaaaaggaatttcccatgcgggcatttatgcgggagagggaaggttcatccaagcaagccgctccgaaaaagtcaccatttcttacttggcggaagattattggaaaaaacatttcacaggggtgcgccgattcagcaatttagccatttctaaagacaatcccgttgtgtccacagcggccgatcatatcggaatttcttatctgaaaggcggcgcttcaccggaaaccggctttgatacggcgggatttgttcaatacatctatcaaaaagcgaaaggaatcagcctgccgcgttatgccgacaagcagatgcaggcgggcgttccggtcgataaacaagatctgaagcccggcgatctggtcttctttaaagcggaaagcctgaatccggccatttatatcgggaacggacaagtgattcatgtcaccgtgtccgcaggtgttaccataacaaatatgaacacaagcgcttattggaaggacaaatatgcgggcggcatccggcttccgtaaaaaaagacgtcagagagtgtctctgacgtctttttcttttaccgtttcggcgctctgtatccggccgctatcgcatcctctacagaacagaacatttccgcgggatctgtcgtccggtcgtagtacgtacttcccggcgtgtgataaatgccgtaccggctgcctttaatgtcgcatccctgtgaggtgccggctgctttcgtttcggcatgtcctccggaggaaggggcgttgttttgcgccgtttccgcgttttcggatgtttttgtttctgctttctgccgctttaaagttttattttctgactgaagcgtttcagcggtcttttcgagcttcttttgtgaattttttaatttctcattgtcttgtttgagtgatttgtttgtttttttcagctcgcttatctcttggctgagtttgctgagtttttcttcattgccggcttcagcttcggatttctccttttcggctgcggcactgatgctttcatattttttctcaagcgcctggtgttccttcgtcaatttttgataagccgtatcaagggtgctgtatttctcctctgccttcacggccgaggcgtccggctctgcgagggatgcaccggtcagaagcaggataaatccgccgatgagaagaggccaaaacagcttttttgaaaaatgtttttctttttttgccgctttgcatatgagatgaaaaattccgtatccgactgcgcagagaaaagctaaaaatcctataatagcgattgcattcgacatcatgaaactccttttttagaaaacatgaaaaagccaggccgtgaaagacctgacttttaccttttattgcccattgtcgagaagccggttgatgaaatatgcgacgccgttttcatcgttgctttttgtaatataggtgcttttttctttcagttcatcaatcgcattgcccatagcgatgcggtttcccgccgcttcaaacatggagaaatcattcgggctgtcgccgatggcgtaaatatcctgtttttcaattccgtacagtgaggcaagctccgtcagagcacgtccctttccggaaccggcagggaggatttcgataatgtgttttccggaagatgtctgggataatttccgatgatgtgtaatttcttctttggcgtttctcagtttttccatatcaaaagagaaacaaagaagcttgtaaacatgttcgtctccgttaaaaatcgcctgtatatcctgtacgggtttaatgccgaattgtttgaactgcgtctttgcgccctcccataatgtctgaatatcttccttaggattggcgcttttcagaatgtccagttctgcctgcagtttggactcgccgtcaaacggggacagcagatgatcatctgtatagacctcaaagtaaatgtctttgtccgttaaataagcggcgatatccttcccggcctgctgatccattaagagccggctgacgaggcggtatcctttgtcatggactgtcccgccgtttgccgcaatgatcggaatatccaaatccttcaagagcgcttttacatcaaacgtggctctgcccgtgcagatggccacgagaatgcccgcttcatccgctctttgtaaagccgctctgttttccggagaaatcacactgtccgaattcagtaatgtgccgtctaagtcaatggctatcaatttcatatgtatggatgccctccttaaaaataaagctgcttcatgtagtatgttcagctttgtgcgaaatcagcagaaagccgtcagttaaaaggctataccttcatgtcctttttttcaacagaaaaacggcgggatttgctaatcccgccgtgacatcttacgcgtctaaatcattttttaatttcgtttttacttcttgaaggttttcctcattcagcttgaagtaataaatatttttgccgtactgaggagtgtaaatgtagctgtctgaacctgtcagctgcaaagaattcaccgatttcagcgatgtgataaacgggaacagaccgatggcgtcattaagagataagttcatttttaagtttttccctaagctgtcgacgatatcgtcataagatgggatcgagcttaacgatttagattttttaataatggcgctcagcacttccatctgtctttgtccgcgcatcagatcggtgtccgctttgcgtgttcttacataagccagtgcctgctcaccgtcaagcgtctggacgcccggcttcagcacgacttttccttttgtatcgactttaatacgatcggcaattttctggcttttcacatttaccgtaacgccgttcaactcattgacgacatcgcggaacgcgtcgaagttgctttcaaccacataatctaccggaatatcaaacatgttttctactgttttataagttaaattataaccgccgtaagcatgtgcgtgcgcgaatttgtcatagccgtgtcccgggatgttgacataggaatcccgcggaatgctgagcatcgtcgctgttttctttttccggttgaaggtgacgagcacgttggcgtcacttcttgcgtcatctactgattcacccttattgtcacgggcgtctattcctaaaagcaatacggtgaaagaatccttcttcgggtcaaattctttgatccgttttacggactggtcgccgcggtcaaggctgacgtgcgcttctttggtcgcattattcaatttcacaaatgcgtaggtgccgacggaaccggcgatcaccaataagaaagcggcgaataccagtacaaatttcacccattttctgaggcgtcttttcttttttctgcgttgagatcgttcttccatatcattacctctcgtttctattctttgtgaagcgtaccataattgttgactcggagcaactctgcaaatgagaaaattctaaatctttctctctatttcgacaacatctactgttatttttgcatcaggttcacattatattggacggcaggaagcgggaaatgtttcgtcgctttgtgaaaaataatcagtaaaataatggatattaacggtgcggaaggtttgaaacgatcggaaacaggcaaaagaagcagtagaacaattccgcgcggatacagcgttggatgaagggagtctatataacatgaaaagcatacactcgaataaatggctctattttttcggcgctctcgggggcgcgttatacggatatgataccggagtcatttccggagctattttatttatgaaaaaagaactgggactgaacgcctttacagaaggcctcgtcgtcagttcgttattggcgggggcgattctcggatcgggattcgccggcaaactgaccgaccggttcggcaggcggaaggccatcatgggagcggcgctgctgttttgtataggcggattaggagtcgcttttgccccgaatacagaggtgatggttcttttccggattattctcggactggctgtcggaacatcgacaacgatcgtcccgctctatttatcggagctggctccgaagcataaacggggggcgctttcttcgctgaatcagctgatgattacggtcggaatcctcgtttcttatatcgtgaactatatatttgccgatgcaggcgcttggcgctggatgcttggacttgcggttgtgccgtcagtcattctgctgatcggaatcttatttatgccggaaagcccgcgctggctgtttacgatcggcaaagaagagaaagcaagagaaatcctttcatcattgcggggaacgaagaatattgatgatgagattgatcagatgaaagaagcggaaaaggaaaacgaaggcggcttgaaagaattgtttgagccgtgggtgagacccgcgctgattgccggcctcggacttgcctttttgcagcaattcatcgggacaaatacaattatttattacgcaccgaaaacatttaccagtgtcgggttcggcaattccgcgtctatattgggaacggtcggaatcggcgccgtcaatgtcatcatgacgcttgcggctattaaagtcattgataagatcggccggaagccgctgctgctggccggaaatgcgggaatggtcatcagtctgctcgtattggccgcggtcaatcttttctttgaacattcagcagccgcatcatggacaacggtgatttgtttaggcctgtttatcattgtgtttgcggtcagctgggggcctgccgtgtgggtcatgcttcctgaattattcccgctgcatgtccggggtatcgggacgggtgtctccactttgatgctgcatgccggaacattgattgtctcattaacctatccgatgctaatggaagcagtcggcatcagctatttatttctcatttatgccgctatcggaataatggcattcctgttcgtccggtttaaagtgaccgagacgaaggggaaaagccttgaagaaattgagcaggatctgaaaagccgtaacggaggctcgggatcagaatcaaatcggcggacagttcatccgtaatattcagttttaggggggcggttattcaccggcccctcaaaacggatgcgtgcgggcgcccgcacggtcacataaatgacggggatatgtcatacgttgtataaagtcacgataaaggcggggatgccggtgaaaacgagtattattatccttacatataatgaacttgagctgacgaaaaaatgtctggccagcattgaacgatacaccgacaaagataagattgaactgattatagttgacaacggttcctcagacggaacgagagaatacatatcaaatctgcctgacgtcaaagtcatccttaatgaaaaaaacctcgggttcgccaaggggtgcaaccagggaatcgaagcggcagggggagaaaatctgctgtttctgaacaacgatacgatggtcacgaaaaattggctcacctccatgctgagggtgctgtatcaatctgaaaaaaccggtatggtcgggcccgtcagcaactatgtcagcggcgcgcaaatgatccatgacgcgtatcaatcgcttgatgagctggagtcattcgcggaggcgtattgtgcacgggaaaagcatcaaacaaagcgggtgctgcgccttgtcggcttctgtcttctggtgaaaaaaagcgtcattgaagacatcggcccgtttgatgagcaattcggatacggttcttttgaagatgatgacctatgtctgcgcgccctgcaaaaaggatacagcctgcacatcgctctcgatgcctttgtgcatcaccacgggcatgcgacgtttacggctaatcaggatatcaatatcaatcagttatattcggagaaccgccagcgttttacggaaaaatggggcactgattttacgtactttactcatccgagaccggaaattgcggagctcgttccccgggaggcgaaacggatacttgatgtcggctgcggtgcgggagctacggggctggaacttcaaaacagacagccttgcgaactgtacggaatagaactgcacccgctggcggcgcaagcggcaaaaggacattatgaagcggtgctgcaggaagatgtcgaaaaagtgaagctgccttatccggaaggcttttttgattgcatcattttcgcggacatccttgagcacttaaaagacccgtggcgcgtcattgaaacgtactcatcctatttgtcgcctgccggatcaatcgtttgcagcattccgaatatttcccacgccgaagcgctgttcccgcttctgctcggggactggacatacagagacgccgggattctcgaccgcacccacttgcggttttttacgccgcagacggtgcgcacgctctttccggaagagacatttgacgtgaaaaagcagtcctatacgtatgttcacgtggatgagcgggtgcagctgtttttacaggaaatcacacgaatggcgcaatcgatgcaatttccggtgacacagctgcccgaacaaagccggatttatcagattctccttcgtgtcgaaaaaacacgctgaaggctaccgccccatcgttccgaagttggtaatctgaatggaaacatcatagtcaaaggccgcttcggagaaggtttcatcccagtgatgcttcactttcttccaatagtcgggatattgaatgcggactctgtcagaaaagaagacagggtccgtttcatattgattctgcagcttatcgatgacttctttcatatcgcttttcagttttttttcgaaaaccttttccagcccgtttaaatagtgctgatcgaatgaatcttctccggcatattgatcctctgacaaaagtccttttgttttcaccgctacgtgaaacgacagcttcccgtttttcagcagggggtgatggaggatgttgattttttgatctcgaaggtaattgggtgccctcctttatccaaagcgggcagcacgccgccctgtatcgtccccgtcagccaattcaggctttgtacttcgtatgatgacagaaagcctgccaatctgttttgttttccgtttttgataatggccgctccgtcatacaccgtttttcctttttgattgctgacggcctgaatgagaaaactgagtttattatggcagtaaatcgaagctctcccgattcggagcggttttaaaatcttcccgttgtagccgccgttgttcgtaaggtcgatcagcttttccgcgggcatgggctgctgctgattcggcgtcggctctgtcagaatatcggccgctttgcctcttgccgcgaagagatagctgctccgccttaattcatcatcacggataaaatggttcatcatctgcagtatattttggtcggccagcaatttgtcgctgaatatcagcacttttaaatgatcgctgtaaacgggcggatcttttaaagcgacttcactgacggcttcaagaatggtatcccccgcgacgtcacattgacaaacacgggccggccggaagcctggctgttttcactttggggcagcaggttttgataggttaatttatatcggcggtcactcgtctcgtctatcgccagcccccgggcgaaagatagcttttcgacttccttcgcatcccagcaccctgaaagcgtcatcagtatgaaaagcgccgccgcccattttacgaaatgtgtcatgacgtctgtttcctcccggctatttttttcatccagctgacaaaccagatgagaaaaggaatcataatgacggcaaaaaacgcatatccgagaatattcgcgaatgcaaacacactgttgatatcatcagggtacattgaaaggccgaatgtcactgccaataagccccccagcagccaggcattgtttttatttttcagtctgaaaatggtgtttaacccgagatgcgctcctttaaaagaaccgagcatacaggtgaactgctggcatgtccacgtaattaaaagaaagatatcaaacctttcgatgaaaataccgcggatttccaaggcgtgaatcagggaaatggtcggatatgtcaccgttttggcttcagcgatcgacatacagccgattacgacaagcagcgtaaagctgtaaaataagcctgcgcatgcgatgccgaagacggcagcctttttcgcctgcttcggatttttcataaacggcaccagataaagaatcacctcaagtcctgaaaaatacagaagggtacgcggaaacagctcaaaaaagcttttgtagcctccttccatgaccgggcggatgaaatccagtttaaacagtctcaggctgaatatgagcagcgtaatcagaatgacgatcgcaatcggaaagagataagcatagagttttgaaatgggatacaccccgccggtcacatggtagatgccgaccgccagaaagatgaatatgacgacacccatcggcgtatttttcagtaaaaagtaattgatgacctcaccgagaaaacgggcttgaaaacagacggtgacgacaaaataacagctgatgaataaattaagaagagaaccgatggcgcgtcccataatgctttgattcagctcataaatggtttccccgctgtttttctgcaaaaatggcataaagagcaggacgatgccgataaacacgagactctgcacaagaataatgatccatccgctcggactgtccgctgctgcggcggagcgcggcagtgttaacacgcccgctccgatcattgttccgcttaccatgagaagtgtctgcataaacgacagcttgtcttccggttttttcatggtgatcacctttgcttgattttatctttcgtctcttttctggtcggccgttttttcaaaagaggcgtcggcagtctgacgatcgtatcttttaagtcctgtcccggctgcgccatgatcggaataagatagtcctggccgaagcttttcaggcgcatcagatggccgacgacaagcagataacacatgatcagtccgtataaacctaatatcgccgacaaaatcatcgaaaaaatacggatgagtctcagcggaaaattgaacgcataggagggcgccgtaaaagaagccaatgccgtaacggatacgataatgaccatcatcgcgctgacgatgttcgcctgaacggcggcctgcccgatcaccacgcccccgatcaggccgatcgtctgtccgatcggcttcggcagcctgagtccggcttctctgatcatctcaatcgtaaaaatcataataaacgcttcaacaaaagggggaaacggaacattcaatctgcttccggcaatcgtcaccgccattctcgtcggcaaaagccccgtgtgaaacgtaacgagcgatatgtaaaggccgggtaaataaatcgtgattaaaatgcatgtataccgaagcagcctgagaaagttaaccggaacccaccgctgattataatcgtcaggtgagtggataaattcatcaatggtagccggcaccaaaagggtaaaaggcgttccgtctacaagaatggagacccttccttccaaaagagcgcccataacccggtcgggccgttcggtcgtcaagacggtcgggaaaatggaatacgtgttatcttcaataagctgctcgatcgttcctgattccggaatgtcatcaatggtgatcgaatccagtcttttcatcacttcttttacaacatcatcaggcgcaatatcccgaatgtaggcaacggcgatccgcttttttgtccgttcgccgagtgtgatctctttgatctggaggttgggatcaccggactgctcgcgcaaaagcgccgtattcgttcggagcttttcgacaaaacctatcctaggtccccgttcaagcacttctgaagccggttcttcaatatcacgcattttaaatgtttccgtttcaaacgaaagggcttcctcccatccctccgccagcaaaaccgatttgccggaaaaaatgtctgcctccgcgtccttaagtgaagaaagccgggtgtgacgatagccgaaagagatggatgacggcggtatttcagccggttcctcttgatgcagggcggccgcctgcacgggcgaaataatatattccgcaagcaattgattgtcggtcagtccgtctatatatataaggcaggcgtcacatttgccgtttccgtacgtaaacgaataaaacatcatgtcatcgctttggccgatccgttttttcagcgcttcaaggtttttgccgagctccgcatgtatcgtcataatgttcccccctttccatcagttattttaatttgcgacaaacaaggcattttattctggaataggaaatgactgagcattccgccccatccgaatggtataatgagcaggtcagccattttatacatattgtttttaaccgcggctccctccgtgttttaaaaaagacacagggggaatgggatatgagccgctttttaaggggaggggaacgaacatgacgcaagagccgatttttctacagcctgtatgtaaagaaaaaatatggggcggcacgttattacgcgaacgattcggatatgacataccttcagaaacaaccggcgaatgctgggcgatatcagcccatccgcacggaatgagcacggtcaaaagcggtccgtatcaagggaaaaccttgatggacctgtgggatcagcatagagagttattcggcggaacggaaggggaccggtttccgctgctgactaaaatactggacgccaaacatcatctgtccgttaaagtccatcctgacgattatgacgccgaggagcatggacagggcgaaacggggaaatctgagtgctggtacattattgactgtaaagaaaatgcggaaatcatatatggtcatacggcccgttcgaaagcggaacttgtcaccatgattaacagcggtgactgggaaggcctgctgcgccgcgtgaagatcaaacccggcgatttttattatgtgccgagcggaaccatccatgccatttgcgccggagcgctcgtgctggaaatacagcagaattcagacgccgcctaccggatatatgattacgggcgtacagatcaaaacggcggtgcgcgtgagctgcatatccgcgatgccgtcaacgccgccaccgttcctcatgtggacggatttttggatgaatcaactgaaacgagaaaaggcatcaccattaaaacctttgtgcagggagaatatttttctgtatacaaatgggatatcagcgggacggcggaaatgacccaggacgctccgtttatgttatgcagcgtcacagaaggaagcggctccatcatctttgaaggcaagtccgccaagcttgaaaaaggcgcgcatttcatactgccggatcagatgcctgactttacgataaacggagattgcacgatcatcgtttctcatatataaaaccaaacttaatcccagctctgggattaagttttttttatttggataattggatgatttctctctgtaaaaatgaagaaagcgggccgataaataaactagtttgatagaaaccaattgaatcagaaagaggagaaggaatgaaaaagagattcgttgcacctatgttattgtccgccgttttccttgtctttagcaccgttacacagcacgccgaggccgcatacagcgactactccgtttacgagctggaaacgaagcagcaatttgcttctgagaacgaggcgcttcaagcggcagcgaaattgaaaaaggatacggggtggcaggctgacgcaaagaaagccggaaatgcgccgctcacttatcaaatctcagcttcaggcttacacgatgaaacggatgcgaaaaccgtgctgaaagattttacgaagcagacgggcgtggccggcacttacagcgcaagcggaagcaaacagccgtacgtgaccgtcacatcaggcgttctatcagacgagcggcagacgaaaaatcttcttgccgaactgacgaaaaaaacgggcgtgaccggcgccgtcaagccggcggggacaaaacagccgtataagcaggtcgtgacttctgagatggcggccgatgcggatgcaaaagcgctctcgcaagcgttgacgaagcagacgggcgtgaaagcgtcataccgtcagatcaaacgggaaacagcccggtttcagatccaatcgggaacaatctccggcgatcaaaaagccgctcaaattcaaactgattttcaaaaggaaacaggattgcagtcgtcgctgaaagtcacggcaaaggccagtccgaatatcaccgtgacagcctctgacattttaaatgcaaataatgcggcaggtttagcgaaacagctgcagcagaaaacaggcgtcaaagggaacgttcaaaagtatgcccaaagcaaaacagcaaccgtgtataacgtgcagtcaggatattttaacggagtaagcgccgtacaaaatgctatcacccaaatcaagaagaatacgggtgtcagcggaagctatcaaaaagccggcaagaagaataattacacggtcgcgatgagcggactgacggctaaacagctgcaaagcgtgcaagctttctttaaaaagaaaaaatggcattgcgacgcatcgcctgtcaaaaagacagcatcagtgtccgtttaccggatcacggcagggcagcttaccgctgcaaaggcggatcaaacggaggcgtttttccgccagcagcatgtaaagacggcaagaacagcggcgggaaaaacagcagaaaacgaatatcagctgctttctcagcagacggcagaccagtcgaagataaaaaaaggattgaatctgctggcgggatataaactgactgccatttcaaaaacgatatccaagcagacggacacaacgtaccaagtcacaaccgaatcactgcttgatacggcaaagatcaatcaatcgctggattttttcaaagggaaaaaagtatccgcctccgcacagaaaacaggtgaagcggcgtatacacaattcagaattgaaacggcaccgctgcttaagaaggaagacattgaccgcgtgactgcttttttcaagcaaaacaaagcggccggcactgtgaaggagacggggaaaaccggctctgcacaatacgtcatcaaaaccgaaaaattcagcagtaaaaccgttttaaataaaagcatgagctttttcagcgccaaacaattacaggccggctatacgagtgaaagccatccggtttatgaactccgcattcgcaatcaattcacgggagcgcagtcagcggacgccgcctcccaaaagctgaaaaagctgtacggatggacgatggctattctgaaaataaaaaacggaccgcaaatcatgaacaccaattacaacatctcgctggcagatatggtcaaaaaacaaatgacagtcagcccgcagactgatgccgcggcttatgcatcgcttacgtacatcaatacggcctccggaacggtcacagccgacgtcctgaacgtccggtcaaccccggaagtcagctcaggcaatattatcgggcagttgaaaaaaggcgataaagtcagcatcacaggccagacaaacggctgggccaaactcagcatgggctggagaaacgccagcagtgacgaagtcgggcagtacgtcaatccggctcacttcgcacaagacagcaagtattactttcaatttctgaagctctctcagacagccggactgaacgcatcggaactgaatcaaaaagtgctggtcaataaaggaatactgacagggaaaggccaggcctttattacagccgccggcaaatacagcattaatgaagtgtatttgatttcgcatgctttgcttgaaacgggcaatggcacgtcagagcttgcgaacggcattatgtataatggtaaaaaggtttacaacatgtacggcatcggggcttatgacagcaacccgaattactacggcgcacaatacgcgtataagcaaggctggtttactccggaagccgcgattatcggcggagcccaatttatcggtgcgtcttatattcacaatccttcatacgagcaggatacgctgtataaaatgagatggtctccagccgcggctcatcagtatgcgacagacatcggctgggcgtataagcaggtaaaccgcatgtacagcttatactcactgctggatgactatacgctttactatgatgttcccgtgtatatgaaagtataaaaaaagggctgaagtgtatgcttcagccctttcttcatgcaaaaaacacccgcctcagattcaggcaggtgcttcagcacaatttttcatttttgtttccgcaaatttcaataacgcttcactcgaattcccatctgaatacatattccatttgtccgagaaccgcttcatttcttctgcatcaaatggctttttcgtcatttcctccaaaagagcttcactgtcatgacaagcctttccgggaatgacggaagtataattgtcgattaaaccgcgttttcgatcatattcctccagatcatacgtgaaaaagaaaatcggtttatttaagagcgcgaattcaaaaggcacggaagagtaatccgtaattaaaatatcagccgctttcaagagatcatgaagacgcatgtcagacacgttcttgatcaattcgctttcaaacgaagccgaaatatgatgcaaaacggcaggatgaagctttacaagcagcatatactctccgtttaacgcgtttgtgagctgttcttcggtgaatggcagccgaaaggactgcatatcataatccctgaatgtcggtgcgtacaggatgatttttttcggccatttgtgcttcggttcgggcttgtgttcttcataatagacgtcagtcagggggacacccgtttttaacagctggccgtcccgtatgccgaacgactttttaaaaacgtcagccatcgcgtctgaaccgacggtgacaaagtcaaacgagcggtacacttttttaaaacggctgatgtctgatgccggacggttttgattcgtcacatcctcaaggccgaactttttcaaagagccgttcgcatgccacacttgaatacatgtcgtttgcggccggcggtttaagacgcttgtcatgaggaaatagttatccgttatcaccgctttgctcttaaaaaggatcaaaaccgccttcaaaagatgcagcggatgtttttcgttcagataaaaagagccgagtccttccagctcttttttcagactgacggcgtgtctcgtatacaaaaccgtcacttcataagaaagcgattcagcgtgcgctttgtaagaacggatgagagcctgtgcattctcttcaaaagataccagcagggtcagatggttcttgggctttacaggcttgaacaaaacgcccagaacagacagatatatagaataaaaagcggcgaataaagatcgcaagttcatagattaccaatctcttttgctgttttatttgtttaaagctgtttcgtttgatcttctgcctgctcggaatacaggcttttatttgatttattatttctcaaaacggtaaaagcatacttcggaatgttcagcatccttttccatctccacggattcgtcaccagtctgtacagccattccagattcgttttgatcatccattcaggggcgcgtttcaccgttccgctgaacacatcaaagcttccgcccaaaccgatcgatacagcctgagggaaaagatgtttgtattcataaataaattgttcctgatggggatatcctaaggcgacaaacacgagatcgggtttcgcccgggaaatctgtttggcgacgaagcgtttatccgcttcataaccgttgctggctccgacaacctcaatattcggatactctttgccgatccggttcaaaacggcgtcaagcacgtcttgcttagctccgtataaaaatatttttttagactgccggtttgcgagaccgagcagcgacagaaatacatcgaatcccgcaattcttgatttcagcgggtgctgcgtcaaacgtgacattaacacgacgccgataccatccggcaggacgaaatccgcggaagaaatgacttgatgataacctttgtctttcgccgcagcgtatccgatctcagggttgaccgtcgcaatgacggctccttgcttttgtgcgatataataagtgtctaaatatgaaataaactcctgtaaatttccattaacataagaaaggttgtgcaccatttcagtctgcatctgccgtcctcctttttgtacgggattttctttcattttttcgtgacttaagctaagctttattttaacataataccttcagataaacttaacaatagttttacaaaaatataaataagataacaatttctttaatcaaccgcgcaaaaaccctgctaaactcctattgcaataacatttgttaataagtggaatttaacttcgttttacattagcttaaccttttcagggctatgtgatataatgaggttccatgagtacgaaattggcactttagtgattaaggatacagctgcgcagcatttcagggcagttgcttgttatacgtatgatgatagaaaggagcttttgtttcatgaagaaggtcattacttacggaacgtttgatttactgcattggggtcatattaaactgcttgagcgcgcaaagcagcttggagattacctagttgttgccatctcaacagacgagttcaacctgcaaaaacaaaaaaaggcctaccacagctatgaacacagaaagctgattctggaaacgatccgttatgtcgacgaagtcattccggaaaacagctgggatcaaaaagtacgtgacgtagcggatcacaacatcgacgtgttcgtaatgggagacgattgggaaggcaaattcgatttccttaaagatcaatgcgaagtcatctatctccctagaaccgaaggcatttccaccacacagattaaaaaagaaattgccggggtgtaattgaaacattcggatatacagatgataaagaagtactccctccggatagggagtacttcttgtaatataaggttattttcgctatatttgttatgcgcttttgaaaaaaagctagacaataagaggagaatttaaagatgaatcttagtaacttttttaagttgaataaaaaagagtccaagccgtccatagaagaacgcgaatataccattttaaacaaagaagcattggcggaagagaagaaggtagcggtagtcgttcctgtttataatgcagaagaatatgtaaggaaaacagttgattctgtgatccttcaaaacatcggctttcagcatatttctttaattctggtagatgattgctctaccgatgattccagaaacatcctgactgagtacgccgaattgtatgaaaatattacagttgtctttttgaaagacaacacgggaactccggcttatccgagaaacttgggaattgagctggcaaatgcgaagtacattacatttttggatgcggatgattggtttgcgccgaacggggttaaaatcttattcgacatgcttgaaagagatcatgtaaattatgcggtcggaaaaacgatcgaaatgcaggtgaacggtcaaaaaacgatcgggaaacatgagtcttcgctgaacagagcgaaggtatcgcctttttcaatccggcatattttctatcatctgggcccgcgggcaagaatgatgaacttacaatttctaaaagataacgatatcagatatccggaaatgaaatttgctgaagataagcaattttttatggatgttcttttggcgtgcggagatatttcaacgtcaaccgaaccggtctattatctgaacagaatggacaataatgagtcgctgacaaagcagaccaatataatggaaaaaaccgacacgaacatagccgtaatgaagtatattctgaacaaaaaattagatactgaaaaagagaagatggcgatgaaccgcctgattgaattcgattccattacgcggcttttcgatcggatgcacttcctgaaaagcgaaaacaaagaagcctactacaataaattcaatgaaattctgaatgtgttaaagaagacgaaatacgatatttccgagacattttttcatccgattcataaaacagcctaccgtctgctgactcaaaaacggtatgatgaggtcgaaaagctgttccgctggtccaaaaaagagcccgataaaaacatcgtgacgaaagacggactggcttatttagaaagcccgctgacggatgaagaaaataaactggtcgaacttcgcatgcacggagaaacggaaagcgcggtgttcgccgatcataaattcaccgttacgttccgcttgttcggacaggacagaaataatgcccaatatattcagtttcagcacagagataacatgaaagtacaccaccagtttccggttcagtcactgggagacgggcggtacgtccttgaaatcccgttaagtgacattgaaaaagtcggacttggcggttatattatgtatgtcatttataacgattatgaacgtgtcatgttaaacagagaagacggtgaaaaggtgacggcagaagcgaacggactgcaatatcaattctaccggacggtgaaggagaacctttcactgaaagtaacaaaatgatgattgtgattggatatgtttaattgaaacagaggagtagacttattttatgggtatagaaaatcctgtcagatacaagttaaaacatcttaacataaaggaagagacattcagcattacgatatcctgtgaaaatgtcactgcaggggaagagccttctcttcagattataaatcgtaaaacaaaagcggaactttccgtccctctgaaacggttggccggagagggcggagagtaccatgctgtcatgagcacggatctgctttctgaccatacggacggcaaaggatgtctggatttctatgtctcctttatcaatgatgacagtgatatcagtaaaaaacggttaaaatccagccttgaacctattgaactgtcttcttataaagatgaggctcatcatatgtactttttcccttacacgacgaagaaagggaatttctccttaaagctgctgcagaaaaagttcgtcacgcggattgatgaaatggagctcgaatctgacggcagcttacatctgaaaggttttgcattccggctgaatgcggcagaaaccttaaagataaaagaaaaaaacctgattctgaaaatgaaaaaaggaaaagaagaggagcctctcattctgaagtatccgcttcacgacgtgccgagacacgaccttgatgaatatgttcaggacacaacgatgcttgacacgataggctttgatacaaaaattgatttgaatgctgtttataaagaattgaatcagcagctcatctttcaattccatattcaattcatttttgaagatgccgggacaggtgaagaggttatcaccaacagcaaaccgttaaaggttctgaaatctgaacatgtaaaccctaaccaattcacggttctgaaaacggaaaaagggcctgccagatttcacgttttcacgaaaaagaaaacgaaaaatctccacctgagaatgaacgattacagcttcagcacccgcgtggagtattttgtgaaaggtaagctgaaacggggcgcttcctttgtacgcaagagaaagaataagctgaaaaagttcattgagaaaagaatacagaacacttacaaagcaggattcagatttgcaggaaaactgcctgtcaaacagaaacttgtcatgtttgaaagctttgccggaaaacagtacagctgcaacccgcgggcgatttatgaatacatgagcaaagagatgccggaataccgtctctgctggagtgtaaaccccgcttactcacagacatttaaagataaagggattccttatatcgaacgcttcacgttcaaatggctgtttgccatggcaagagccgagtactgggttgtcaacagccgtatgccgctgtggattccgaaacctgagcatacgacatatgtccagacatggcacggcacgcctttaaagcgccttgccgtagatatggatgaagtgcatatgcccggaacaaacactgaaaaatacaagcgcaactttacgacagaggcttcaaagtgggattacctgatttcaccgaacgcatattcaaccgaaatattcgcccgggcgtttcagtttaataaaaccatgattgaatcgggatatccgcggaatgacttccttcagacggataacagcccttctgtcattaaagcgctgaaagaaaaaatgaatcttccgcaagataaaaaagtgattatctacgcaccgacatggcgggatgaccaattttataagaagggaaaatacaagtttgaccttgatttagaccttcaccaattgagagaagcgatcggcgaccgttatgtcattattttacggatgcattatctcgtggcggaaaactttgatctcggaccgtatgaaggatttgcgtatgatttctccagctacgaagatatccgtgagctgtatatggtctctgatttactcataacggactattcctctgtcttttttgactatgcgaatctgaaaagaccgatgctgttttatgtgcctgatatcgaaacgtaccgggataaactcagagggttttactttgactttgaaaaagaagcgcccggcccgcttgtcaaagaaacaggtgacgttatcaaatgggtcaatgaaacggaatcagatgattataagcttccggattcgttcgggcctttttacgagaagttctgttatttagaaaccggagaatcgtctgaaaaagccgtaaaagtgattttcggggacaagtaaataagtgcaaaaaagcataatttaaccatgttaattatgcttttttgcttaagtgacggcatgttgcgctcatgggactcaggcttgttatgaagtgaaaaatacatcgtaatctgttacaattatgagcggtgcttttgtaagtcaaagctattacctaaaacttacgactaaggaagattagaatgaatgcattggtaaaaattctgaaagagcaattcaactcatttccgctgattatgcggcttgcagtgtacgaaacgaaatcaaagtatcaagtgaactatttgggtatattgtggcagtttctcaaccctatgattcaaatgctggcttactggttcgtatttggcctcgggattcgcggcggacatgatatggtgcttggaaatggagacagcgtaccgttcatcgtctggatgctggccggcttaattccttggttctttatcagtccgacgatactggatgcatctaacagcgtttttaaacggataaatttagtgtcgaaaatgaactttccgatcagttcactgccttctgtagtgatagcatcgaatttattcagttactttgtgatgatggcgatttatattattgtgctgctgagcaacggactgtttccgacgcttcactggctgcaatatatttattacttgttttgcatgatcagttttatgtttgctttcggcctgtttaattcaaccatcagcgtattaatcagggactatcagtttttgcttcaagccgtcacaaggcttctcttttttcttctgccgattttctgggacattgcggagaaatttggaaacagacctgaagttttgaccatcttgaagttaaaccctcttttctatattatcgagggcttcagagacagctttatggaagggcagtggtttttccacgatgtgaaatacacgctgtatttctggttcgtcacactgctgctgttaacagtcggttcacttcttcatatgaaattcagagataagtttgttgactttctttaatatagtaaggagattatacgatgaaactaaaagtttcgttcagaaatgtttcaaaacagtattttctatataaaaaacagtctgacaaaattaaaggattgtttttcccaaacagaaatcaaaaaggttttttcgctgtccgaaatgtttcttttgacgtctatgaaggggaaacgatcggattcgtaggtatcaacggctcgggaaaatcaacgatgtccaatctgcttgcaaagatcattccgccgacaagcggtgagattgatatgaacgggcagccgtctttaatcgcgatttctgccggattaaacaatcaattaagcggcaaggacaacatccgtttaaagtgcttgatgatgggtctcaacaatcggcagatagacgagctttatgaaaaaatcgttgaattcgcggatatcggcgactttatagatcagcctgttaaaagctattcaagcggtatgaaatcccgtctcggttttgccatatcggcgcatatggaccctgacatccttattattgatgaggcgctctcagtaggggaccagactttctatcagaaatgtgtggaccgcattacggaatttaaagaacgcggcaaaacgatctttttcgtcagtcattccatcggacagattgagaaaatgtgtgaccgggtggcttggatgcattacggcgaaatgcgtatgttcgacgaaacgaaagccgttgtaaaagaatataaagcttttgtggattggttcaacaagctttcaaagaaagaaaaaaagaaatatcaaaacgagcagattgaaggcagaacgcgggcagccgaggaacagaaaatcactcaggcccagcaaaagaaagcgaagcctaaattcattgccaatacgatacagattacgctgcttgcattgctggctgtcggcgcaggcgcttcgatgttttcagacaagcctctgcgtgcgatcacatctttcggtgacgtcaaacagagcgatgccggcctttatgagtctgtgaataaacctgctttggtaaaagctgaaaaggcggacctttacactgaaaaagatataaaaggaaaagcctccgcaagtgtaagtttcggtacgaaggtgcagatagaagccgagaataaccaggcggctaaagtgaaattaaacgataaagagtactttatgaaaaagactgatctatataaagtgaacgctttaaaaaagacggatgttcagctgaatgatttcagcggcagtttatcaagccaaacagcagaagagtttctctcatatctcaataaaagccgggacgatgtgcagcgtaaattgaaaaatccagctgcgggacaaacggctgacggacggaacgtattaaaagcatccgatgcaaaaacggatgtagtgattgacaatgatacagtctccgaagtggtttttcatttatcgcgtcctgcagacatctcagctttaagtgaaaaaggcggcagcaaaatcaatcagaatttgctcatgcttaaaaaccaggaatatactttttctgtgaacaatgctgataagacactgacggtaacgtctaaaaagtaaagatcacataaaaaaagctgccggattcggcagctttttctattcgtcagcttcttctttttcaagaagatccttcatgaacggaattaatttatggcggatatcctgatcctgtaaggcaaattcaagcgtcgtctcgataaatcctagtttttcaccgacatcgtaacgttttccttcgaaatcataagcgaagacacgctgaatgtcattgagcttttggatggcgtccgttaattgaatttctccccctgcaccgacttcctgctgttcaaggtacatgaaaatttcaggagtgaaaacgtatcttcctaaaatagccaagttggaaggagctgtgcccggttcaggcttctctacaaaatttttgacctggtaacggcggccttcatttgttaacggatcgataattccgtagcggtgtgtgtcgctttcaggaacttgctgaacaccgatgatggaagacaatgttttttcgtattcatccatcagctgacgaagtcccggtttttcagcctggacaatatcatcgccgagaagaacggcgaaaggttcatcgccgatgaagttgcgtgcgcaccaaacggcatgaccgagtccttttggctctttttggcgaatatagtggatatccgcaatatttgacgattttttcactttttgaagcagttcgattttccctttttcttctaaattgcgttccagttcaggggcattgtcgaaatggtcttctattgctctttttccttttccggttacgataataatatcttcgatgccggattcgacagcttcttcgataatatactgaattgtcggcttatcaacgattggaagcatttctttaggcattgcttttgtggccggcaaaaaacgagtgcctaaacctgctgccggaataatggctttgcgtactttcttcactgaataacaccatccttgtttctgcaaaatctttttttcagaactataacctagtctttttccactttaccacaattgattaaaattcacaccttttaatccgctttcaaagagtcttgtaacggtttttgctttgtttgccattaagctttacaatattaagaaacggcataaatatgttaacatgaagggatatccgacatataaaacgaggtgcagacaaaccgttgaaaaaactaaaagtaatgaccgtattcggtacaagacctgaagcaattaaaatggctccgctcgtattagagcttgaaaaatatcaggaaattgattcgctggtgactgtaaccgcacagcacagacagatgctggatcaagtgcttgaagcattcagcatcacgcctgattttgatttgaatattatgaaagagcgtcaaacgctttcagaaattacatctcatgctttgctgaaactggacaagctgtttcaagaagtaaaaccagatatcgttttggtccacggagatacgacgacaacgttcgccggaagccttgccgccttttatcatcaaatcgccgtcggccatgtggaagccggtctgcgtacgcaaaataaatactctcctttccctgaagaaatcaaccggcagatgacgggcgtgatcgctgatgtgaattttgcgccgacaagccaggcagaacagaatctgcttgctgaaaataaaaagccggattctatatttatcacgggaaatacggcgatagacgcgcttcaaacgacagtgcgggaagactattctcatccgatttttgacaagctggaaggaagcaggatgattcttttgacagcgcacagacgtgaaaatttaggcaggccgatggaacagatgtttaaggccgtcagaagaatcgttgaagagtttgaggacgtacaagtcgtttatcccgttcatttgaatcccgcagttcgtgaggccgcagaagcccattttgctgattcggacagggtgcatttaatagaacctctggaggtcgtggatttccataacttcgctgcgaaagcaaatttcattttgaccgactcaggcggggttcaggaggaagcgccttctctcggaaagccggtcttggtgcttcgggacacaaccgagcgccccgaaggagtgaaagccgggacattgaagctggcgggtacagatgaagaaacggtgtatcagctgacaaaacagctcttaaccgatcaggccgagtatgaacggatgtcaaaggcgtcaaacccttatggtgacggatcggcctcaaaacggattgcggaagaactgctttatcggtacggctatagaaaaacccgtccgcagccttttacagaataaaaaaactctgcatcatatgcagagttttttattatttcaggctttcttttaattcttttttgactgaagcgaggcttgcttcatctaatttgtaataatagatattgttgattctcgttcccgttcccttcagttcatgctgagtgactttgctgcgggcatttttatagtcagtcataaccgtccacatatcatcgaatgacatgtttgttttcatattgttttcaatgaccttaaacatatctccgaatttcgtgacagacgagatgtttgcccccttagaaataatcccttcaatcacttggcgctgccgctgctgtctgccgaaatcccctcgggggtcttcttttctcatgcgggtgtaggcaagtgcttcttcgccgttcaggctgatgttccccgttccgaaagaatgcccgtcgtagttgaaggcgaacgtgctgttcaccgtaatcccgccgagtgtatccacggtatctttgaagctctccatgtttactttcacaaaataatctaccggcacgtcgagcaggtcctcgacggtatccgcggccatttgggttccgccgaaggcataggagtggttgattttatccatcgtacctttgccggagattttcgtatacgtatcgcgcgggatgctgaccatttccgttgtattcgttttaggattgacggtcatataaatcatcgtgtccgcgcgccctttgtcatttttccgctcatcgactcccatgattaaaacagaaatcggatccttctttccgagatctatatccgtgtcacgtttgtccgatttttttaagtcttcctgaatgcttgccaccgttgaagccgctttgtgccacaagtagtagacgtagcctcctgatgataaaactaacagcccgatgattgttacgattgtcagaagaacctttttcttctttctttttcgttcagctctcatttgtcatcaccttttctattaactttcatgatgcaatttactaatctttataaacccagtcatatttttacttataaccatgtaatagacgaaattcttaaaaaaaaggttacaaaaagaccttaaaattaccttaaaaaaaagttagtataagacgatacataaagatgaggtgaaaaaaatgaaaaaaactattgcagcttcgttcttaatactgcttttttctgttgtattggcagcgtgcggaacggcggaacaatcaaagaagggaagcggttcttcggagaaccaggctcaaaaagaaacggcatattatatcggtatggcggatacgcacacaattgaagtaaaagtggatgatcagcccgtcagctttgaattttctgatgacttctctgatgttctgaataaattcagcgaaaatgacaaagtcagcattacttatttcacaaatgataaaggccaaaaagagatcaaggaaatcgagaaagcaaaataatacaccatgatcagcaaaaggcgggataaaaattgaagaaaacaatatgggctgtctgtttttctgtgatattcagcctggctttattaccggaaagcacttttgcggccagttctgatatctcagtaaaactgacgaattatattggtaataaatcgactctgaatatcgaaccttcaggaacttataaactgacgggaagcgatgtgtcctccgttgtcagattgggaggcgcgtccaaatatgatacggctaacgccgcgacatctaagtattggaaaaacccgtccaacgtagtcgtcgtgaatacggacgcttattttgcggacacgctttccgtcattcctttagcgaataaactgaaagcgcctgttctgctgactgaagcgaaaaaactgagcagcagcacagaagcgcaaatcaagaaattcaatccggataatattttaatcatcggcgggacgaacagtatttcgtcagccgcggaaaagacattgaagaaatacggccgtacgaaacggatcagcggaaaaaacagatatgatctgtccaaaaatattgcggccgaaatgggcagctatgaccaggcggtcgtagtaacggggatgtatatacggatgcgctggcaatcgcgccatatgccgcgcaaaacggctatccgattcttctgacgaaaaaagactcccttccgagctacaatctgcctaaaaaagtgatcatcatgggaggcacttcaagcgtcagcaaagatgtggagaatcaaattaaaaagaaggcctcggtcaccaaacgaattaccggatcaaacagatatcaaatatcagcaaacgcagtcacttcgcttggcatggatgcaagcaaaacggtggctgccaacgggactaaattagcggacatcgtagtcggatcaaatattgccgccgcaaatcacatgccgcttgtatacatcaaaaaaagcgaaacacccgccgacgaggccggcctttttaaaacgaaaggcacctattcttatacattaataggcagcgcgaattcaattgccgattcagttaaggctgcttacgcaaaagagttttatctcgtaaacggaaagacgtaccgtattgaaacgtccggcggcaaattaggcgttgcaggcattaacagcggaaaaacgtctttcaaggcggttcctgaaaaatattcaacagcaaacacaatcagcattgacgggaagccatatctggggaatatgagtttcactgctgaatccggcaaatatgtaagacctgttaatgaaaacattccttttgaggattatctgaaaggtgtcctgccgaatgaaatgccgggaagctggccgacagaagcgctgaaagcccaggctgttgccgcccgcacctactctatcggcaagatgggacaaacagtcgcggatacaacggcctttcaggtttacgggggatacagctggtatccaaacgccaccgcagccgttaacggaacaaaagggaaagtgctcacttattccggcagattgatagatgccacttactcatcaagcaatggcggttacatggaagccggcgatgaagtgtggggatcgaaagtgccgtatttagtagccaaaaaggacacaaaagatcccgaaatcagctggtctttaacattgcagaagcagcagctgccagcgggtctggatatgaaaaatcccgcatcctggtggtctaaaacaaacgaagcaaatgctgcgcagctcaacggaataaaaaattggctgatgaaaaataaagaaaccaatgcaagttccataaaaattgcaagtatctctgatctctcgctcaccggaaaaacaaaaggccagcgcgcggaagacgccgcggtgaaggtcacgtaccatgtgaatgacaagtcgaagggctatgtcatgaacaagactgcatctgttgaggtgaaagcgtctgaacttaggacgatgatcggagcttcatcttttaaaagcacatacgccagtgcgtccggtaattcttcgcaaatcacgatatcaggaaagggatacggtcacggcgtaggaatgagtcaatacggagcaaaagaaagagcggaggccggagagccgtatacttctattcttgcgttctattatcctaatacagcacttacaaactactaaacttctgtggaggagatcggattgaaattcatcataaaatgtctccccgtctttattctcggggtcattctatttgtcccttccgctttggctgacaacacggttaaaaggatcggcggaagcacccggtatgatacggctgtactggcggcaaaacaatcatggggtgaagcgaaaacggtaattatcaccggcggaacttcatatgccgatgcaattgccgctgcgccgcttgcatatcaaaaaaatgcgccgctgctgtttacaaataaagatcagctgtctgccggcacaaaaaagggattaattgatttaaaaacgaaaaatgtgattatcgtaggcggcacacctgccgtttcgaaaaataccgcaaatcaaattgctaaattaggcatcagtgtcaaacggttatcagggagcacgagatatgccacagccgcaaaagtggcgggtgaaatgacaagatcttctacagcccttgtggtcaacgggtttgttgatgcggatggaatggctgcgatttcttatgcgtccgctaaaaaatatccgattttattcactaatgattcaacgttaaatggttctgcgtccaatgcgatcaaaagcttagggattaaaaacacgattgtcatcggcgggacaagcagcatcagcagctcactttataataagctgccgaacccttcgagaatcagcggcaaaaaccgctataacctgtctgtgaatcttgcaaaaaagacaggcttaagcacaggctatacgtttgttaccaatggctttaaagaggcggataccatcgtcggaggcgtgctgagcgccaaacagggaagagttcacctgctgacgaatggagacagtctgtcaaaagacgtccggacgtatatcggaagtaaaaacatcaccagcttcaccgtcataggaagtgcttcatctttaagcaacaatgccgcgtcgcagcttaaaaatcccgttgtcggcaaaacggtctttattgatccgggacacggctatcaggattcaggtgcaaccggaaacggcttgcttgagaaaaatgtaaaccttgatatcgctacgcgtcttaacaatcaattatacggcgcgggcgcgcttactgtaatgtcaagaaagggcgacacctttgattcgcttgaggagagagtgaacaaaggggcgaaggcgaacgccgatattttcatcagcgtccatgcaaatgcgaatgataacagcagtgcaaacggtacggagacgtattatgataaaacctaccaatcggcaaacagtctgaggcttgcccaaaatattcagccgagaatggtttctgctctcggcacgcgtgaccgcagtgtgaaaactgccggattttacgtcattaagtattctaaaatgccgagtgtcttgttagaaaccggttttgtcacaagcccgattgatgccaatattctaaaacaatcaacgaaaaaggacagactcgcggcggggatcacccaaggcgtttcctcctatttcagataatttttttcatggaaacagaccggttcataccggtctgtttttttattttttcattatgctttgtctcaaatatggatatgaatagatttacaataaaaaaacaataatcgaaacattctaataaacattaacgtttcctttacttccaattaacatccatctgctaaactcacggcataggtcatcaaacatcccaacaaatcgtgaggtgtgtgtcagtgggagcagagaaaagcatgaatgtaaataataactatgcagtgcggcaggggacttccgctgccgttacggaaagaacggcccgttatttggcttttaagcgattcatggacattgtgtttgcgcttgcggggcttttggcggcgctcccggtgatgggcctgttctccatactgattcgtttggagtcgcccggcccggctttttacaagcaggagcgggtaggcaaagacgggaagccgttttatttgtataagctccgctctatgaaaatagatgctgaaaaatcgggggcggtctgggcgctgaaaaaggatccccgcgtgacaaaggtcggcgcttttatcagaaggacccgtattgatgagctgccgcagctggtaaatgtgcttcggggagaaatgagcctgatcggcccgcgtcccgagcgtcccgtgtttacggaacagtttcaggctgagattccggggtttacggagcggctggccgttaagccgggattaagcggctgggcgcaggtcaacggggatatgacatgacaccgagggaaaaactgatgtttgacttatattatatccgcaacctgaccttttcattggaactgaagattatgctcaaaacgtgcaaagtgatctggaccggtgacggggcgcgataaaaattctggtcagcagacaaaaaagtagggaaaacgatgcctagtattacaaatcaaattttgagcggcgccaaatggacaagtatttcgacagcgtgtattacggtcattcaaatcgtccaattcgccctgctcgggcgggtcatgtcactggctgaattcggccttgtcggcatgatcacaacggtagtggtgtttgcccaaattgcgcttgatatgggttttggcgccgcgctcattcaaaaagatcatgtgactgataaacagatgtcttccttgtactggctgaatatcataacggggcttgcgctgtttgcgctgctgttcttcagcagtccgctcattgccgatttttatcggcgggaggagcttgtctatttaatccgcgtgctggccgtcatgtttttaatcgcgccgatcggtcagcaatatcaatatatgctgcaaaaagcgctggcatttaacacgctaagcaagattgaaatcttttcaaatgtgctgtccttcgtttacttggcggctgcggttttttatacggacccgattctcgcctatgtgatttcccaggtgctgctgcaatcgtcaaaaggtattctgtactgggtgtcctgcagaaaaacatggagaccggtgttcgtttttgatctgaagggaatgaaaggcttcttttctttcggagcctttcagctgtcttcccggcttgtgaaccggctcggggcgaatattgatatgattctgatcggcagttttatcggcgccgaggcgctcggcatttacaatctggcctaccagattgtcacgcttccggtattaaaaatcaatccgatcattacgagagtcgcgtttcccgtctttgcgaaaaacaagcatgaaaacagcgtgatcagagaaggttttctcaatatgaccaaaatactcgcgctgatatcctttccgcttttgctcggtttggtttcagtatcggatgcattcgtggcttcggttttcggagaaaaatggctggcggctgtcccggttttaaacgttctcgccatcgtcgggattttaagggttctgatgaatccgaacggatctgtgctgctggcaaaagggcgggccgatctggcattttattgggacgccggggtgatgctgctgtatggtgcatctttgtacgccgccgtgctgtccggaaatctcttgacggtagcctggacgtacgctttcatcagcatcctgaatttcctgatcgggcgctggctgctggcatatgtcattaagctgcggctgtcggcttacttcaaagccgtggccaaaccgtttctgcttacggcggcaatgggtgtcatcgcctttacagccagcttcgggacggagcggatcagccttgatgtcaagctgcggctggcgatctccgtatcctgcggagcgttgtgttatttgttcctgttaggaaaagcttatccgcatatgaaaagtaaattaagaaaaggacgtttgctatgaaggtattgtggatgacaagtgtatatccgagcagtgagaagccgggagaaggcgtttttcatgagacgcaggcccaagaactgagaaagcttggcgcggagatgactgtcatttgtccccggccgaaactcgccgcgccattccgggtgctgaaaaagacgtatcggcaaaaggatataaggccggcgcatgaatggcggaaaggcgtgtccgtccaccggccgttttatcaggcggttcccgggcagctgaaatgggcgcagccgcataaaagaatggcgtcatcggttctttccgaaattaaaaatcatggcctgaagcccgatctgattcacgcgcatttcgccatgccgtcaggcggagcggccgccattgtgtcaaaggctttaggcatcccgtatgtgctgaccttgcatggcagtgatgtcaatgtctatccgcattacagcaaaagcgctcatcgcgcatttacatttgcggtgcgggaagcagccgatatttacgctgtgagcggcagtctgcgggaacaaatgaaaaagctcatcgaagcggagtgcagcgtgcttccgatcggcatcacgcttgacgccttccgaaaaaggaacgagacgaaagaagccgtcagaaaacggctcggccttcctccggataaaaaactgatcgtgttcatcggcaggcttgtcaaagagaaaggtgttttcgacttatcaaaagccgttcagtcattggatgaaagatatgaagctgtctttgtcggtgacggtccagccgcatcttcattgcgtgaagccgctcatatcgtcacggggcaagtgccgaacgacaaggtacaggactatctgctggcctcggatgtaatggcgctgccgtcctacagcgaaggcatgccgactgtggtcattgaggcgctcgctctgaaggtgccggtgatctgtaccgatgtcggaggattggcttctttatttgggaaatatagaggtttgctgatcaagccgggttcacctggcacgctggcagaatccattctgcaatatgacgaaggagaggcttggacgccgcaaacagccgaggaactttatcaaaccgtccgcacgtattttgacgcaagccaaaacgcgaaagcgctgaaagagaaataccggtccgtcatgaaccggtccgggcaagaggagaacctttcgaaagagggatgaagctgtgaaaaaaatcgctgtattaggaacagggtatgtaggtcttgtatctggaacttgttttgcggaaatcggccatcatgtgacttgctgtgacatcaatgaagcgaaaatcagaagcttgcaaaacggagtcatcccgatatatgaaccggggcttgaggaattagccgaaaaaaatgtcagtgacgggcggttatcctttacggccgatattgagccggctgtgaaagccgctgatatcatctatatcgccgtcggtacgccgatgtcaaagacgggtgaagccgatctgacctacattaaggcagcggcgcaaacaatcggagaacagctgaacggatacaaaatcattgtcaccaaaagcactgttccggtcgggacgggaaagctcgtttaccaaatcgtcagcgaagcgtcaaagggaacatatccgtttgatgtcgcgtcaaatcctgaattcctccgcgaaggttcggcggtgcgggatacgatgcagatggagcgggcggttatcggcgccacaagcgaacatgccgcttcggtcattgaagagcttcataagccgttccgtacgaagatcgtaaagaccaatcttgaaagcgcggaaatgattaagtatgccgcaaatgcttttttagccgccaaaatatcttttattaacgatatcgccaatatttgcgaacgtgtcggggcggacatttctcacgtgtcagaaggcgtcggtcttgacagccggatcgggaataaatttctgcaggcgggcatcggattcggcggatcctgctttccgaaggatacaatggctttattgcatatcgcaaacgccgccggctatccgtttgaaatgatggaagccgtcattgaaaccaatcagaagcaaagggtccgtattacggaaaaattgaaccgcgccatcggtcccttaaaagggaaaaccgtggccgtactggggctggcctttaaaccgcatacaaatgacgtccgctccgccccggctcttgatatcatcacaagtcttaaagagcagggcgctcacgtgaaagcgtatgatccgatcgcgattcccgaagcggcagcgatattaggagaaggcggcattgaatatcacgcagagatgtacagtgccatcaaaaacgcggacgcatgcctgattacaacagattggccggaagtcaaggagatggatcttcagagagtgaagcggctgctcaaacagccggtcatcattgacggcagaaatatgtttccgttggagtatatgagggtttcaggattcacttatcattccgtcggacgtccggcggttcatgccgatcggcaaataaaagaactggcaagatagaaaaagatttgtcttcaggctctcggcagcccggctcggctgccggttttggaaaggggtttgccatgtgagtatcaaacgttcagcggcacatgttcttgtgctgcttgccgctgtcattacaggaggattcatcatgctggaggcggtcagggcggatgccggcctcggaaaaatcaccgtgctgctgcttgccgccatgatcggtattgccggacttgctttgctatccgcctttacaacaaacggtcagatgtttatggggctcatttatatactgatcgcgtgtacatttttaaaccaggccttctttgcggttcatctcggatttttcagcttatttatataccggctgttattaatcggagcgggcgccctacacatcgccggcatcctgacaaaccgtcatcatattgacagatggaatcgggtgaatgtaaaaggggttctgatgtttttcgccttatggtttacatacggtctcctatcgttattgtgggcaaaatccgtgacgtacgggattaaatatttagctttaataggaatgggcatgtttttgatttatcttattgtcatgttcattcagcgctttgatcagctgatggttttttacggcatatggcttgtgatgaccatttttgtgatggcgatcggcttttacaaccattttacacacaaccatctgccgagctccacgctttataacggcccgcagtacaaacagcattatccgacgtccgttttctttaatcaaaatgatttcgcgacgtttttgtgcatcagtttctttctgtatgcggcggcggtgaaaaatatgaaaaacggctatgtgaaggccgtcagcctgctcttagcgatctgcgctttgtatttaatcattttgaccggttcgcgcgcgagtctgctgggcatatgcgcgggggcggctgtatacgtcttcatcctgctgccttctctgttgaaaaaattcgcgctgtacgctgcgggagcgggtgctgcgctgtttgcggttttatttgcgggccgtatcaccaatgccgtcttgaatctgttttcagctccgcaggcgatgccgggacagcagccgcttccttccaacctcgccagggcgaatcttttaaagaacgcctttcactatgtaattgattcctgggggtccggagtgggtgccggaaacgtctcttactatttaaaagcggagcccgtttatgatacgggcggcgtagttgaggtgcacaactggctcgtcgagattatggcgaacttcggcgtacttacgatgctcggttacctgacagtctatttgttccttttttggacactttataaatgtcatgaaagaaaatcggaaaatcagtcaagactgatcacagaaggacttatcacggcgatggccggttttttggtaagcagcatcagcccaagctccgtatcgaatttatttttccactgggtatttctctcgctcgtgatcgcggcggtcaatatattgaggcgtttacaaaaggagcctgccgtcacggcgtactatgaaaaacagggagatgcgagatgaaggatatgttgacaagaataacccggcgtatcaaaaagaatatcatttggatcattgcgctgcccgttgtgttaggggcggcgggatatgtattgccgtcaaaaatcagcggaaacagcagttttacatcagaagccgcgatcgccgcgggaaattatgatcatccgctttataacaatacaaaagaaatcccgctccttttgacgagcgatgcctttttaaagcaggctctgcctcataaaacagacgaagaaagagcggccgtgaaaagtaaactgactgtcgaaacacaatcagattcattgatcacggtcagctgcagcggccaaaacaaacaggaaaccgaatcggtgtttcaagccgtcataacaacttttctgaagaatgatcaggacctgtttgaaaaacgggcaaaagtagtgcggcagagtattgctgcgcttgaaggagaaaccgtcagcgcggacgccaaagtggataaggaacgatttttatacgaattgaaaaatacgcagctgaacctgaaagcggccggcgtcatcaattcagagccgatgaatgaaacggctggtcaaggcatgccgccgaaaaagaaagcggttctgggcgttttaatcggcattgcagttgcctttatgttcattgtcattcctgagttttttagagagtccttgtaaaaatctgcgatggagatgtgaccatgacaaactggaaacctttcgtatctgtcattacaccgtcttataacgcaagtgaatatatcgaagacacgattcagtccgttttacaccaaagccacccgcattgggaaatgattatcgcggatgattgttcaacggacggaacgagagatattttacggcaatatgaacaaaaagatgagcggatccgcgtcgtttatttagataaaaacgggggagccgcagctgccagaaatacagcccttaaacatgccaagggccgttatgtcgcatttctggacagcgatgacagatggaaaaaggaaaagcttcaaaaacagcttgcgtttatggcagagcggtcctgcgctttttcatttacgggctacagcgtcatggagcaggacggaacgccgacggacaaaacgattcaagcccctgaaagcctgtcatatgatgaagctttaaaaaacacgattatcggatgtttaacggtcatgattgacagagagcagacggggcagattcaaatgcctgatatcagaacgcggcaggatttagcgacatggctttccctgctgaaaaggggatttacggcttacggcctgaatgagtgcctttcagaatacaggcttgtgcagaattcgatttcaagcaacaagtggaaagccgcaaaaaaaacgtggtttgtttatagagaaattgagcgcctgcattttatcaaggcttcgtggtgttttatgcaatatgcgaaaaacgcggtcttgaaaagactgtaggcgtcagaggagctgggtgatgaaggtggaaccgattattcacgtaatcgtcggagcggcggaatgggggcatgaccggctgagatacagacggcatcggctggctgaatttcttgcccggcaaaaagaaacgaaaagcgtcatttgggtatgcccgtccccgcgagccaatgatgatcagatggccgggatcgccgagggaatccggcagttcactgtaaaggatctcatgcagcaaaaagcattccgtttcggcaggtatacagacatgtgttacaggcataaactttcaccattgttgcacatgctgaaggaagaaggagaaggggcccgctgctgcttatggtacaccttccccggtttcccgcttctggcagatctgtttccttgggatgaagtgatttacgattgcagtgatctgtgggccgctccgatcagcggccgggccggtgtgctgtcaaatgtaagaagaaacatcattaaacaggcggaaatgagaatcattcagcgtgccgattccatcacctgcacatctgactgtctgcaccgggaggtcggaaaaaagctggagaacccgcaccagaaagtgttcaccattgaaaacggagtggaatatgacctgttttcacgggaaaataaacagccggatgaagacattttacggggacgaaacggaacggttctcggttttatcggcggaatcaaaccaaagctcgattttgcgcttatggcggaaacggcagatttgcggcctgactggacgattttattggtgggcccgaacacggctcaggacgatccggatttcgagtcgcttctggaacgcccgaatgtcatctggacgggacctgccgcgccgaatgaagtgccgtcctatatgcagcttgtcgacatcggcatcatgccgtataaaaattcaccttataatgacgcggtatttccgcttaagctttttgaatttttagccgccgggaaaccggttgtcggctgcaacctttcttctacgtcaaaaatcaaaaggccttacgtttatgaatacgttgaagggagcgaccccgcagatttcatcgcggcctgcgaagcgcttctggcagcggaccgccgcggatcatacgaggctttgcgccgtgaattggcccggggacgggattggaatgttttattcggccgaatgcttgaatgcacgggtatattggaaaatgcgcaatcccattaaaagggaaagcgcattttttgatttgcgtgtttctttttgatgatgcttgttataataactagtaagaattataatggaaggaacggttcaatatcagaaaagacttcatataattccaaaggagacttctttatgcttgacgaacgcatgtttcgcatagttgttgcgttttttgtctctctgctaacggttttaatcctaactcctatcgtaaaaaaaattgcgatcaaaataggtgcagttgaccagcccagcaaccgaaaagtacatgataaaataatgccccgtatgggcggcttggccatctttatcggcgtagcggcgggtgtgctcgcggccggcatatataatgaaacgaaaatgaccgccattacggtgggtgcgtttattattgttattttaggaatccttgatgataaataccaattaagcgcaaaggtaaagtttttcgtccagctggccgtggccattatgattgtgagcacgggactgaaaatggactttttctccgtaccgtttttaacggaacgtttagaattgggatgggtcgcttacccgctgactgtgttatggatcgtcggtattacgaatgcgatgaacctgattgacggtttggacggactcgctgccggcctgtcggtcatcggactctccactatcgccgttatggcgttgtccggagggaaaatccttattctgtcactttcacttgtcgtgataggaagcacactcggatttttattttataattttcacccggcaaagatatttatgggagataccggatcgctctttctcggatacgtcatctcagtactctcattattaggtctttataaaagtgttactttattcagtatcatcattccgatcatcattttgggcgtgccgatttttgatacgacattcgccgtcatcaggcggattttaaacaaacagccgatctcagcgcctgataagtcacatatacaccaccggctgatggccttcgggctgtcacaccgcacggctgtcattatcatttatttaatcggctttattttcagcgtcagtgccatcctgctgaaaagcgcgaccatttggctttcgctgtttattatttttgtattgattgtatttatgcaaatcatagcagaggtcacagggttagtaaatgaacaatttaaaccatttaccaagttttacaaaagattggtaaagaaaaattaaaaagagcagatcatgcgaatggtctgcttttttgctattctcttattatatagaaaaacccgatcctgctcaaaggatcgggtttactcttaatagcctgttgtgccgccggactgtgtgctgtccgtaccgtttgcacctgcagtaccgttggttgaatcggttgtgccgcttgttcctgtgctgccggaagtcgaatcagccgtaccgcctgttcctgtgctgccggaagttgaatcagtcgtactgtccgttccggtgctgtcagaagcgggatcggatgccgtgctgtttccggacgggtaatccaggtgcttctgcaattcctgccgtactttctcgagattggttggatccggctggaaataatatgttccgcgcgtagttgcggttccgcctaaatataaatctgatcctgttatggtcagtgtatcaatctttttgctggtaaatccgctgtaaatctgctgaagagcgagtccttcagtgattcggatattcgtttggacattattgctcgctgtttcagcgattttatcgattttagcaatatttccagctctggacatttggtcgatcagtgcgtttaaaatttgcttttggcggtcattccggccgaagtctccgcgcttatcctgctttctcatccgcgcgtaagccaaagcctgctcaccgttcaaatgcatgtttcctttcttgaaatagatccgtttctttttactgacgtcactcatctcgtcgaagtcaaacggcacttttacatcgaccccgcctacttcatcaataacatccttaaagccattgaagtcgacagtgacatacttatcaatcggtatgcctaataagtcttcgacggttgagacggtttcatccgctccgcccttagcaaaagccgcattgatttttgttttgttgccggttgtgtcgccggcaagcgtcacccgcgtatcacgcggaatactcagcattttcattgttttatttctcggatcaagggtaacgacaataagagaatctgatcgtccgccttttccgctggtggcataattttcgatccccataaacaaaatggagaacggttttttcttcatattgatgactttatcccgcaattttgatttttctccgcgggaaagggcatcatatgcattatctgccgcattgatcgttttgtatactttgtatccgccaaatccggcagcaactaacaaaacgagggtaagcagcagcaaaatccgtttgaatatgatctttcgtttgcttttctttttctttcgaacacgcactcttacacgttcagccattacattagtctcctttagggctgacgtctgtttctaaatacgtcagttctccctctgtattcttactcttgccgttcgtcagttctgtcatccattttagaaacgcttctttgtctttttcttcaacgtacgtttcaaattcgacatgatccgcataatggatatctttcagtaaaaaaactgattctctcagttcgttctctatcttgccgagccacgtataatccgctgatgtatgcataatccgcatcagcttccgctccgtaactcctatatgatttaagccttcagacactgacttcccatatgcacgaatcaatccgcctgcaccgagctttattccgccgaaataccgggtaaccaccgcgcaggtatctttcagaccgcgttttttcagcacttccagcatggggacgccggctgtgccgcttggttctccgtcatcattggccttttgtatatggtcggtttcgccgatcagataagctgagcagttatgagtcgcattccagtgctgtttttttatcttttgtataaattcctgcgcttcctcttcagaagcagcacggctcaggtgacagataaaacgtgatttttcaatcacaatctcatgttcacccgtttctttaacagttaaatagctgtgcagcatgattgctggaccctcctgacaagcattaaaagacttgtttctacaaattcgaacagactttagaatttttgcgcatattttggtatcatgaaagagtaagatactatataaaaatgtttttttctagaatatacgcattctttcattataattcgacataaattgcagttcaattacatttataataaaaatacataacaacaccgttacggagggagacagatgaataaatcgaagatggactccaaagttttggattctatacttatgaaaatgctgaaaaccgtggacgggagcaaggacgaggtttttcaaatcggagagcagtcgcgccagcaatatgagcagctggttgaagaactcaaacagatcaaacagcaggtgtacgaagtcattgagctgggggacaaacttgaagttcatacgcggcacgcacgaaaccgcttgtctgaagtaagcagaaatttccataagttcagcgaagaagaaattcgcaacgcctatgaaaaggcgcacaaacttcaagtggaactgacgatgatccagcagcgtgaaaagcagctgctggagcgcagagatgatttagaacgccggcttttggggcttcaggaaatcattgaacggtcagaatcattggtcagccaaataaccgtcgttctgaattacctgaatcaagaccttcgccaagtagggcttcttcttgccgatgcgcaggctaaacaagatttcggcttaagaatcattgaagcccaagaggaagaaagaaaaagagtttccagagaaattcatgacggtcccgcgcagatgctggcaaatgtcatgatgagatcggaattaattgaacggatcttccgcgaccgcggcacggaggacggatttcaggaaatcaaaaatcttcggcagaatgtgcggaatgccctttacgaagtcagaaggattatatatgatttaagaccgatggcattggacgatctcgggctgattcctacactgagaaaatatctttatacaactgaagaatacaacggaaaggtgaaaatacattttcagtgtatcggagacacggagaacaaaaggcttgccccgcaatttgaagtggcgcttttccgtctcgctcaggaagccgtcacaaatgcactcaaacattcagaatcagaggaaataacagtaaaagtggaagtaaccgctgattttgtcgttcttatcattaaggacaacggaaaaggctttgatattaaggatgctaaacaaaagaaaaacaagtcatttggcttgctgggaatgaaagaaagagtagatctgcttgaaggaacgataacgatagactctaaaataggtcttgggacatttatcatgattaaggttccgttatctctcggcctataatttgttaaatagagccaaaagacatattgaccgaacagcggcgtatatagaacaataggataaggaggcgtagcgtgtgactaaagtaaatattgttattatcgacgaccatcaactattccgtgagggtgtaaaaagaatattggattttgaacctacctttgaagtggtagcagaaggtgacgatggagatgaggcggctcgaatcgtcgagcattatcatcccgatgttgtcataatggacatcaatatgccgaatgtaaatggagtagaggctactaaacagcttgttgagctgtaccctgaatctaaggtgattatcctctccatccatgatgatgaaaactatgtgactcatgctttaaaaacaggtgcaagaggctatctcctgaaagagatggacgcagatactttaatcgaagcagtgaaagtggtagccgagggcggttcttaccttcacccgaaagtaacccacaatcttgtcaacgaattccgccgtcttgcgacaagcggagtttctgctcatcctcagcatgaggtttatccggaaatccggagaccattacatatattaacgagacgggaatgtgaagtgctgcaaatgcttgcagacggaaaaagcaaccgcggaatcggtgaatcattgtttatcagtgagaaaacagtgaaaaaccacgtgagtaatattttgcagaaaatgaacgttaatgaccggacacaagccgttgtcgtagccattaaaaacggctgggtagagatgcgttagtcatgtatgagaagacttgccataataggcaagtctttttttacagcttcatatctattaaaatacttattaagtacttaataaggcaggtaaagtgatgaagattgcagttgtaacagacagtacagcatatattccgaaagagatgagagaagaacatcatattcatatgattcctcttcaagtggttttcggtgaaaaaacattccgcgaagaaacagaactcgactggagaagtttttataaagaagtaaaaaatcatgatgagctgccgactacgtcccagccttctttcggtgaattaatcgcattgtacgaagaactgggcaaaacatatgacgcagtcataagcatacatttgtccagcggaatcagcggaacttataacagcgccgcctcggcaaacactatggttgatcatattaaagtttatccctttgattcagagatcagctgtttggcgcaaggtttttatgcattaaaggcagcacagctcattaaagacggtgttgactcaccggaagagattattaaagagctggaagaaatgaaaaaaacagtccgtgcgtattttatggtggatgatttatcacacctccagcggggcgggcgtctaagcagtgctcaggcttttatcggcggtctgttaaaggtaaagcctattcttcattttgacaataagataattgttccttttgaaaagattcggacacgcaaaaaagcgatttcgagaatttttgaactgtttggggaggatgcaagtaaaggaatcccgatgcgggccgctgtcatccatgcaaacagggaagaagaagcggcggatattatacaggagttaagcggtaaatatcctcatgtcgaattctataacagctatttcggtgccgtgatcggaacccatttgggcgaaggcgccatcggaatcggctggtgctttaaaaactaagtgaaaatctccgttttcaagggcggagatttttttattattaaattttcgtgattcgacaaaaaaattcccggcaggcatactttgaacagaaaggaggcagggagatgtccgaaggtgcttcagaattttcagaggtgcgggatttcttttacggccggcatttattgagatctgagataccgttttcagatcagcgcatcaaccgttttatagaaaaagagcatataacggccgagccgtcaatcatccgccggaaaaaccgttacgtctgccaacgatgcggtcagtctgatcaagcctgctttgcggcattttgggcgccctctgccaaaaggcagattacctattgccgtgcctgtgtcatgatgggaagggctgatgaactgacatcattatattcttggaatcaagcccctgaaaacagctgggagcctgtaaagctttcttgggaaggaacactgacagacggacagaagcaggccgccgccgcgcttacagatgcgataaaagagagacaagagctgttagtatgggcggtttgcggatcggggaaaacagagatgctgtttcctggtatcgagtttgccctgaatcaaggtttgcgcgtctgtgtcgcgactccgcgtacagatgtcgtacttgaactgctgccgagactgaaaaaagcatttgagaaagtcgacgtttctgctttgtacggcggcagcgaggacaaaggccgcttgactccgctgatgatttcaaccgctcaccagctgatgcgctaccgagacatttttgatgtcatgataatagatgaagtagatgcgtttcctttttcagccgatgagacattaagattcgctgttgataaagcgaggaagaaaaacagcgcccttgtttatgtaacggcaactccttcagacacattaaaaaagaatgctgaagccggtttgctgaaaagcgttcgcataccggccagatatcatcggaaacccctgccggagccgcgttttttgtggtgcggcaattggaagaagaagcttcagaaaggaaaactgccgcgctctgtaacggattgggtccgccaaaaacttcaatcacagctgccggttttcttattcgttccgtctgtacacgtattgaaaaagacaacggattattttcagaaattaaacatacgggcagaaggcgtacatgcggaagacacattcagaaaggataaagtgaaacgattcagagacggccggcttgatctgctggtaacgactacgattttagaaagaggggttaccgtgcccaaagttcagacatgtgtcctcggcgcagaagcacctatctttactgagagcgcgctcgtacagatcgcgggcagaacgggaaggcattataaacatttcagcggtgatgtcgtcctgtttcatttcggaatgacaaacggaatgaaaaaagcaaaaaaacatatagaacttatgaacaaattggcacaaaaaagtaaattgttggactagttaatttcagaaaacatgatacagtatactcatactttcctatgaggagctgtcagcatgcttgtcaattctaaagaaatcatattaaaggaacttctcgaccgccatatgcctaagcttcatatgaaatgcacatgccgggtatgcaaaaatgatgtactggcactttcattaaaccgggctgagccggcatatgttacagataaaaagaaagttgcttatgcaaaagcagagatagttgataaacagaaaaatacggcgctgcttgtcattctggctgaatcagccgcgattgtttcggttaatccaagcgagttctgtgaaacttgggaaggagcgtaatatctctgaattgtttattgtgtgactcaccaatttcaagttcattgacttggagatctttgttttctctggcgcccgagcaagaggtatgcaccatatgcagcagccgattcgaaaaaattgaaggccccgtatgcagtatatgcgggaggcctcaggagtcaaatgaaaaatgcgctgattgtgcggcccgggaatcaaaaacggaaaagcgctttttgctgcggcaaaaccgttcggtatatttgtataatgatgcgatgaaggactcattagcccggtttaaattcaggggtgatgcgaaaatcattcaagcatttggacgtgactttgctgccggctttaaagcggcatatccatcaaatacacatactctcatccctattccgctgagcggcgaacggctggcggaacgcggattcaatcaatccgagctgctggcctctctgctcggaatgcccgtcattttccccctcatccgactgaacaatgaaaaacaatccaaaaagagcaaaacagaaaggctgtccgcagaaaaaaagttttcagcagccgaaaactcggccgaaggtatgaacgtcatcttaatagacgatatttatacgacgggcgccacactgcatcaagccgccgaagtcctgctgacagcgggtaaagcgtcatcggtctcctcttttactttaatcaggagctaaatcattctttttttctgccgatataattgatagaaatataaggcagattaaagaaggaataggagttaatacgatgggtgaattggcgaattgtccaaaatgcaatgctttattttttaaaacgaacctgcagaccgtgtgccaggcatgtattaaagaagaagaaaaagcatttgaaaccgtctataattttttgagaaagcagatcaacagacagtcgacgatgcagcagatcactgaggaaacaggtgtggatgaagagctgatcctcaagtttatcaaacaaaaaaggattcagatcagccagcttccgaatttggcatatccttgcgaaaggtgcggaaatccgatcaggacaggaaaattttgcaagtcctgtcagacagatattgagtcgcaattagaccatatgaaccaaaaaacagccgctgaattcaaagaaaaaaacagtacaaaagacacatactatgcctataataccaaaaacacctgattccctaaactaactgataacgcagtcgataaaagaattagactgcgaacagaaagcgagaggaatcctatgaaaatcaatcagtacggaacacaatccgttaatccataccaaaaaaattacgaaaagcaagccgtacaaaaagaggctgcaaagccgaaggacaaagtggaaatttcttctcatgcaaaagagcttcaaaatgcgtcagatgcggtcactaaaacacgtcaggaaaaaatcgctcagcttaaagcggatatagagagcggaacatataaaatagattcaaacagcatcgctgaaaacatagtgaatttttataaaaagcaataaaaaggagaaagtcaatgtctgcaaagccaattattgatcaactgaagcgactttgcgcactgcatgaacatctgctcacgctgtctgaggagaaaacggaagcgctgaaagcaggtaaaacaaaagagctctccaacatattgactaaagagcaaaagtatattcaggcaatcgggcagactgaggaagaacgaatcaggttaacttctcagtttctcagccgcggtgaggacaatacaattgctgcatgcatctccagaacttcaggcagtgaaaaacaggagcttgaagggttatttcactctctgtctgcgcttcttgaccgtctgaaagaagtgaatgagatgaacaaacagctcacgattcaggctttacaattcatctccggggcattcgatatgatcatgccgggtgaaaaagagaatatgaattataaagagccgcaagcggcgcgcaagcctgtcagccgtttgacattattcgattcaaaagcttagaacggaggattttcaatgccatcgacttttatggggctcgaaacagcaaggcgtgcattgagtgcgcagcagactgcattgagcacagtttcaaataacgttgcaaatgcaaatacagaaggatatacgaggcagcgcgtcacattacaatcgacgagcccttatcccgcagtatcaaaaaacagtgatctgacggccggccaaatcggaacaggagtaaaagccggttcagttgagcgcgtcagagacagttttttagactatcagtacagaacggaaaatacaaaattagggtactatacagcccgttccaattcattgtcgcaaatggaaggcgtcatgaaagagcttgacaataacggattaaacggatcgctcagttcattttggaatgcccttcaggatctggcgacgaatccggaaaatacgggagcgcgctcagttttgcaggagcaggggaaatctcttgccgaaagttttaactatatatctacctctttgactaacattcagggtgatattaaaaagaacctggataacacagctgatcaggtcaattccattctcaatcagctgaatgaccttaacaatcaaatagcggcagttgagccgagcggtatgctccctaatgatttgtatgaccaaagagacagattgattgatcaattatcttctatggcaaatataaaagtttcatataataagtcgggcggacatgccttggcgactgctgagggcacggttaacgtcgaattgctgaacgggaacaacaattctctcggaacgctgctcgacggtaacacaaaaacagtttcagaaatgaaaatcaactacgacaaggacagcggactcgtgtcgagtgtgtcagtcggcagcagtacggtcaatgcggatgcatttaccggaaaaggctcacttttaggtcttattgaatcatacggctatatgtcaaacggagaagaaaaagggctttatcctgaaatgctgacggctcttgacaatatggcgctatcctttgctgacgcgtttaatgcagttcatgaaaaagggaagacctatacaggcgaacagggtgcagcattttttgatttcagcggtgatgaagcggtgccggcaaaaggtgcggcagcgaaaataaaagtcagtgacaaaatccttgcgtctactgataatatcgcagcgtcgttaaacggagaaaaaagtgacggcacaaacgcgacaaatcttgcagccgtacagaacagcaagctgactattaacggtgaaaccactacaattaatgacttttatgaatcccttatcggaaagctgggcgttaattcacaaaaagcggctaatcttatgaacaactctgaaagcaacaccctttcagccgatgaacggagacaatcagtcagtgcagtgtctttagatgaagaaatgacaaatatgattcagtttcagcacgcttataatgcggctgcgcggatcataacgatgcaggatgaaatattcgataaaattattaacggtatgggcaccggaggaagataggagataagtaaatgagagtaactcaagggatgatcgcaaaaaattctcttcgatttatcggctcaagttatgacaagctcgatcggcttcagcagcaagtgtctacggggaaaaaaatcacgaaagcttctgatgatccggtcgtcgcaatgaagggaatgcagtaccgtactcagcttgcgcaggtaaaccagtaccaacggaatgtttcgcaaggttttacatggctggaaaactcggaatcaagcgtaaactcggaaacggatattatggggaaaatccgggacttgatggttcaggcgaaaagtgattcgaacggtgaaacagaattgaaagcaatcggtacagaaatcggccagctgaaaaagcagctcgtttctgtcgcgaatactcaggtaaacggacgttatctgtttaacggaacgaattcagatgtcccgccgatcactgaaaatgccgacggcacatatacgtacaactatgagaattataccggtgcttcggatgttaacatcaacatctcaaacggagcagtgctgaaagtgaattctgatccaaactcagctttcggaggcgtcgcacaaaatggagataatgtatttgaatttctcaactccttagaagcttctttaagcaaaggcacgctgtccgaagcagattcaaatcaaattctgtcagatatcgacggttttactgacaaaatgaatgctgaaaaatccaatatcggcgcacgcacaaaccggttggaactcattcagacaagattggaatcacaagcggcaaccgctgaaaaagtattgtcggataatgaggatgtagaaatggaagatgtaattgttgattatttatctcaacagacggttcatagagcagcgctgtcagtgaatgcgaatatcattcagccgtcactgatcgacttcctgaaataatataactatcgtcttcaatatataaaaaaagcgactcacaacagggagatcgctttttttactaaaatactataaacaggagggatctctgtgcagatgccgagattgattattgacagtgtgcctgctaaaatcggtataacctttcaaaaggaagaaatcgagatggaacagccgcccgctgacctggaaatcgagcagccgccggcagagctgaacatcgaaagcacgccggccaaactgacgattgaccagacgagggcgtgggagaacttgaatctcaaatcatttgaaaagctgaacgctgaagccgctcaaaaaggtgcggaagcctgcagcgagtttatcgcaaaaacagtcagggaagggaaggaaatggcggctatcgaaaagaaaacgggcaatgtgatggcccggcaggcagcagatgtcagtccgcccgatccattcggcgaattcagcgactttctgcctgcgcagtttctcgtcgacattgactgcattccttcaaagcttacgattgatattgaagcccgcaaaccttcaattgaagcagctgtcaataaacctgtatggaattatacgccggggaaagttcagattgatatgatgcaagaccctaaggtgacgatttcggttgatgatggcaacgcagaataaaagatgaaagtggtaaaggattgtgaaggatgataattaaaacaaaatatcacggagaaatcagaatagatgaagggcagattatctcatttgaaaacggcctgccgggatttaatgacgagactcaatttgttgttcttcctttgtcggaagattcaccgtttttggcgctgcagtctgtgaaacaggagcacatcgcctttattgtcgccagtccgtttattttctttaaagggtacgaatttgacattgaccaagcgacgcttgagcttttgcatattgaagatatagaggacgtcgaagtgatggcgattttaacgctggaagagccttttgaaaacacgaccgccaatttaaaagcgccgattatcgtcaataaaaaggaaatgaaggcgaaacaaatcattttacatgatgcttcctatgaaacaaaacatctgataggaggaggatcatgctagttctctcaagaaaagtgaatgagtccattcagatcgggccggatattgaaataaaggtgatcgctatcgaaggagaacaagtgaagctgggaattgaagcgcctcagcacgtagatattcaccggaaagaaatctacttgtcgatcctggaagagaacaacagagccgtatcttttaatactgatttattacttaacttatcctcacaaaaaaagtgaggatttttttattttcaatataaacaatggaagcggccgtccgatatatatattgtagccaatgagaggaaaaattttcttcagaaatgacgctgcgcaaatgcacaaggacgtgcgaaaaacaattcagggaggaaatacaaaatgagaatcaaccacaatatcgcggctcttaacactagccgtcagctgaatgcaggttcaaactctgctgcaaaaaacatggaaaaattatcttcaggtcttcgcatcaaccgcgctggtgatgacgctgcgggtcttgcgatctctgaaaaaatgcgttctcaaatccgcggtttagacatggcgtctaaaaacgctcaagacggaatctctcttatccaaacatctgagggtgcattgaacgaaactcacagcattcttcagcgtatgagcgagcttgctacacaagcagctaacgatacaaacacagattctgaccgttctgagcttcaaaaagagatggaccaattagcgtctgaagtaacaagaatctctactgacactgagttcaacacgaagaaacttcttgacggaactgcgcaaaacctgacgttccaaatcggagctaacgaaggccaaacaatgagcctgtctatcaataaaatggactctgaaagcctgaaagttggtacgacttatacagtatccaatgatcaaaatacattgacatcaactgacggaaaaagcactgctacttgggcggatgaagtaacagatccagatggtaaggttacaaaagcagccggctattatgatactgacggtaaagttattgcatctgaaaaattagctgcagattctaaagtaacaaaaggtatcgacatctcttcttcagctaaagctgcgtcttcagctcttacaacaatcaaaacagctatcgacacagtatctagcgagcgcgctaaacttggtgcggttcaaaaccgtttagagcacacaatcaacaaccttggtacttcttctgagaacctgacttctgctgaatcacgtatccgtgacgtagacatggcttctgagatgatggagtacacgaaaaacaacatccttactcaggcttctcaagctatgcttgcgcaagctaaccaacagcctcagcaagttcttcaattgcttaaaggttaatgacggaaagatcctggttctccagggtcttttttttatttcttcagctaactcctccttcagcaagccaaagaaccctattgacaaaatgaaacattatattttgcagttaaattattgaaaaccttttaatatgaccgatataagaataagatcatacatttatggagctgtgatatgataaacagtcggaaactcactgttgtcatagagccgtctacgactaaacgccgaaaaggagagggtacatatggtcacaagaatcacaggccttaattccggtcttgatgtagattctctggtgaaaaaaatgatggatgccgaaaagcagccgcttaataaattaaaccagcaaaagcagacgcttgaatggaagcgcgatgcttatcgggaaatgaatacccagattgccgacatgtattctactacatttaataatatgctgatgtccacaaactggaataaaaaaacagtaacaagttcggattccagtgtcagcgcggtggccgtcagtgccgaacagaatatttcaacgagcatgtctgtacagcagctggctacgccgacgacttataaatcatcaggggccatcaatttcacttcgggtcaaagccaaacattgaaattcaatgtcacaaatccgggggaaacgaagccgactgaggtaaacgtcacgatcgccgcaaccgatacgattgacgatgtcatttctaaactgaacagctcgggtctcggagtgacggctttaaaagagaaaatctctaacggctcggattatgtggacacgattgcgttcacttccaataaaacgggggaagggtttaccctttcagcaggtgatgacgcgaccaaaagctttctgaaagatcagctcggttttgccgttgatgatgcaacaaatgcactgacggccaatgccgaagggaaaaacgcgaagtttacgttcaacgggcttgaaatgacaaaaacgtcaaataactttacgatcaacggcatcaaatacacgctgaacagcgtgacggacagcaacaaaacggttacgattaacagcacgactgatacggacggcatttttaacaacattaaagatttcgttgataaatacaatacgttaattaaaagcgcaaatgagaaggtgacagaatcaaaataccgtgattataagccgctaaccgatgaacaaagagaagcaatgaccgataagcagattgagcagtgggaggcaaaagccaaaagcggtttattacggagcgacagcacgctgcagaacggtttggcggagatgcggcttgatctgtactcaacggttacgattgacgggaaaaaatatcagcttgccgatttcggaattgagacgtctgatagttatacggatcaaggaaagcttgtcattaaagacgaagcgaaactgaaacagaaaattaccgagaatcctgctctcgtggctaaactgtttaatgcagacagccctgatacagcgaaaaccaaaaacccggaggaacaggggattgcccggagattaaaagacacattaaacaaaatgcagattcaaatttcaaaacaggcgggtacggaaagctcggtatcaaccagctttgccatcggaaaaagcctggatgaaatagaaacaaatatttccaatatgaaaacgaagctggatgacatcgagacgagatattataaaaagttcagcgcactggatacggcattggagaaattgaacagccaatcttcatatctcacgtcaatgttaggatcttcaacttcataaccttgggggttttataaaaatggcaataaataatccttttgctgcttaccagcagacatccgtctttacagccgctccggaagagctgacccttatgctttataacggctgcctgcgattcattaagctggcaaggcaggcgatgaagcaaaacaaccttgaagccaaaaatgaaaatatcgtaaaggcgcaaaacatcattcaagagctcagcatcacgttaaaccgggagattgagatttccgagcagatgtcatccatttatgattacatccgccgccggctgatcgacgcgaacgtgcagaataacggagagtttttagatgaagcggaaaagctcgttactgaatttcgcgacacgtggaagcaggccatgcagagtgaacggaaaaacagccatggcgcgggcggccttgcctgatgaacagcaatgtcttttctttgtataacgaaacgaagaacatgtacgccgcactgaaggacgccccggaaagcgacggtctcatcagcagcgttacggcatttacggagaaaagggaggagatgcttgcgggcataaagccgcctttttccgaagaagaaaaaacgctgcttcagcaggtggccgcgatggaccgtctgattaccggcgaagtgaaacggattcaggatggtatccgaaatgaaataaaaacgcttaagaaaaaacgaatctaccataatacgtatttcaatccgtatcagcaaacgacaagtgacggccgttattacgacaaacgcaaataggtgagtgttttgagaagtttgaacgattaccatttggtgtcagcctattaccagcttctttttacgattgatgaggggctttgctacctgttggacacgcaggatgatttttttaagacggagggcgagcggatttacaacgatttgattcaggctttttttcatctcgattcctctcatgcgcttctgctgtctatcattgagtgccgatgcgtggagacggcgatccgctcatttgacgagatctttcaggatttcagcatgttaaatgattatgatttcccgtccgccccttttcaggagtttttaaaaaccatctttctgccgcattataagctatggatggagcagacgcacgactgtatcaaaccgtatgttcttcactagacctgctgcaagcggcaggtcttttgcctgcgtcctttgcatatacttataatcctgccggaagctgccggataaaaccgacaccattcgtcatcgttcaccgaatttacacattattttaacgtttcagcagggatcagaaggggtaaaagagaaatagttacatatccttagataaagggaggcgttctttgatgaactacaatatcagaggagaaaacattgaggttacacctgcgttaaaggatcatgtggagagaaaaatcggcaagctggaacgatatttcgagcagagcgtcaatgccgatgtgaacgtcaacttaaaattctataacgataaggaatccaaagttgaagtcaccattccgatgactgatctggcgcttcgttctgaagtgcataacgaggatatgtacaatgcaattgatctcgcaacaaacaagctggaacgtcaaatccgaaagcataaaacaaaagtcaaccgaaaattccgcgagcagggtcttccgaaacattatttcgagaacggcagcgctgctgatacgggcgtagcggttcaggacgaaattgaagatgacagcccggaaattgtccgtcaaaagcgttttaatttaaaaccgatggataatgaagaagcgattctccaaatgaatatgctcggacataatttcttcgtattcaccaacgcggagacgaatctcacaaatgtcgtttaccgcagaaatgacggcaaatacggattaattgaaccgactgaataaacccacccagccttccgtgaacgcgcggaaggtttttctctatctttatctgcaaattctttggaaatagcaaaaggtatgttatgataatgagaggtatacatggacagaaaattatcatttattccatgcaaaatctgcatgtgaacatagaggagcgttatagatgcttgggattttaaataaaatgtttgatccgaccaaacgtgcgctgaacaaatacgaaaaaatagcaaatgacattgatgccgtaagaggagattatgaaaatctttctgacgaggcgcttaaaaataaaacggcagaatttaaagagcggcttgaaaaaggagaaacgacggatgaccttcttgtcgaagcgtttgccgtcgttcgtgaagcttcccgccgcgtaaccggcatgttcccgtttaaagtgcagctgatgggggcatcgcccttcatgaggggaacatttccgaaatgaaaacaggggaagggaaaacgctgacgtctacgcttcccgtgtatttaaatgccttgacgggaaaaggcgttcacgtcgtaacggtcaacgaatatctggcaagccgtgatgcccagcaaatgggagaaatctttgcgtttctcgggcttacagtcggcctgaacctgaattcaatgtcaaaagacgaaaaacgcgaagcttacgcagccgatatcacgtattcaacgaacaatgaactcggctttgattatttgcgtgacaacatggtgctctataaagaacaaatggtgcagcgcccgcttcattttgccgttattgatgaagtcgattcaattttagtcgatgaagcgagaacgccattgattatttccggacaagctcagaagtccacaaaactgtacgtgcaggcaaatgcgtttgtccgcacgctcaagaaagatcaggattatacgtatgacgtcaaaacgaaaggcgttcagctgacggaagaaggaatgacgaaggctgaaaaaacgttcggcatcgacaacctgtttgacgtcaaaaacgtggccttgaaccaccatatcaaccaggctttaaaagcccatgcggcgatgcagaaagacgtggattatgttgttgaggacggccaggtcgtcatcgttgattccttcaccggccgtctgatgaaaggacgccgctacagcgaaggtcttcaccaggcgattgaggcgaaagagggcctggagattcaaaatgaaagtatgacattggcgacgattacgttccaaaactatttccgtatgtacgagaagctggccggtatgaccggtaccgcaaaaacggaagaggaagaattccgcaatatttataacatgcaggttgtatccatcccgaccaaccagccggtcatccgtgacgaccgtccggacttgatctaccgctcaatggaagggaaattcaaggcggtggcggaggatgtcgcccagcgctacatgaccggacagccggttcttgtcggtacggttgccgttgaaacgtctgaattgatttctaaacttctgaagaataaagggattccgcaccaggtactgaatgccaaaaaccatgagcgtgaagctcagattattgaagaagcgggacaaaaaggcgctgtcacgattgcgaccaacatggcgggacgcggaaccgacattaaactcggcgaaggcgtaaaagagcttggcggtcttgcggtcgtcggtacggaacgccacgaatcccgccggattgacaatcagctccgcggacgttcaggacgtcagggagacccgggcatcacacaattttatctttcaatggaagatgaattgatgcgccgtttcggagctgaacggacgatggcgatgcttgaccggttcggtatggatgactccacgccgattcagagcaaaatggtgtcacgcgccgtggaatcatctcaaaaacgtgtcgaaggaaacaacttcgattcacgtaaacagcttcttcaatatgacgacgtgctccgtcagcagcgcgaagtcatttacaagcagcgttttgaagtcattgactctgaaaacctgcgcgacattgtggaaggcatgatcaagtcttctctggagcgtgcgattgccgcttatacgccgaaagaggagcttccggaagaatggaatcttgacggcctcgtggagctggtgaattcaacgtatcttgatgaaggcgcgcttgaaaagagcgatatcttcggaaaagaaccggatgaaatgcatgagatgatcatggaccgcatcatgacaaaatataatgaaaaagaagagaatttcggtacagagcagatgcgtgaatttgaaaaagtcatcgtattgcgtgccgttgattcaaaatggatggatcatattgatgcgatggatcagctgcgtcaagggattcaccttcgcgcttatgcgcagacaaatccgctgcgtgaatatcaaatggaaggcttcgcaatgtttgagcacatgattgagtccattgaggacgaagttgcgaaattcgtcatgaaggccgagattgaaagcaatctggaacgcgaagaagttgttcagggccaaacgacggctcatcagccgcaggacggcgatgaggccaaacaagcgaaaaaagcgccggtccgcaaggttgtggatatcggacgcaacgcgccttgccattgcggaagcggaaaaaaatataaaaattgctgcggccggacagaatagtctcgactgtatgaagcgaacatgaccgggtctgcgtcttatggcgccccggatcttttaatgaggtgaatggaatggaattatcagaaatcagggcagagctcgaaaatatggcttctcgtttagcggacttcagggggtctctttgacctcgaatcaaaggaagcccgcattgcagaattagatgaaaagatggcggaaccggaattctggaatgaccagcagaaggcccaaaccgtcatcaacgaagcgaacggtctgaaagaatacgtgaactcctaccatcagctgagcgagtctcacgaagagctgcaaatgacacatgatcttttaaaagaagaacctgaccaggaccttcagcaagagcttgaaaaagagctgaagtcattaacgaaggaattgaatgaatttgagcttcagctgctgctcagtgaaccatatgacaaaaataacgcgattttagaacttcacccgggcgccggcggtacggaatcccaggactggggttccatgctgctcagaatgtatacccgctgggcggaaagacgcggcttcaaagttgaaacgcttgattatctcccgggagatgaagcaggaattaagtcagtcacactgcttattaaaggccacaatgcatacggctatttaaaagcggaaaaaggcgtacaccgcctcgtgcggatttctccatttgattcatcaggccgccgtcacacgtcattcgtgtcatgtgaagtcatgcctgaattcaatgaagaaatcgacattgatattcgtaccgaagatattaaagttgatacgtaccgggcgagcggtgccggcggacagcacgtcaatacgactgattcagccgttcggatcacccacctgccgacaaatgtagtcgtcacatgccagacggaacgctcccaaatcaaaaaccgcgaccgggcgatgaaaatgctcaaagcgaagctgtatcagcgcagaattgaagaacagcaggcggagcttgacgaaatccgcggcgaacagaaagaaatcggctggggcagccaaatccgctcgtacgtcttccatccgtactccatggtgaaagaccaccgcaccaatacggaaatggggaacgtgcaggcggttatggacggagatatcgatatcttcattgacgcctatttacgttctaaactgtcgtaatccgggaacacacctgcctttggcaaggtgtgtttttttatccgttctctttttccatttttcacaacagcgctttagcaaattaatacggtatttggctgttatttacttctaagccgggaagacttaaaatgctatcgagagaaaatcggagaacggaggattttgcatggatgtgaatcacaataagccgctccgtctgatcaaagattacatatatatcatgatcggcgcggcgattacgggggtcgtgtttaacgtatttttgctgccgaaccgtatagcagcggggggagtaagcgggatcagcaccattttagaaacgtttggttttgaaccggcttatgtgcagtggattattaacatccctttgtttatcgccggagtgatcattctcggcgggaagttcggaatgaagacactggtcggttccatcgttctgccgcttgccgtctttttaacaagagatctgcctgccgcgacgacccatgaactgctggcggcgattttcggaggcgtcgggatcggaacgggaatcggcatcgtgtatctcggcaaaggctccacggggggaacggctctggcggcgcagatcattcacaaatacacggggctgtcgctgggaacgtgccttgccatcatggacggattaattgtgctgagcgcgatgctcgttttcggagtggagcagggactgtatgcgatgctcggggtatttatttcaagcaaaacgattgatgtcgtgcaggtcgggttcaaccgctccaaaatggctttaatcattacgcagcatgaagaagccgtcagatcagctgtgtttaaagaaatcgacaggggtgtgacgaagatttccgcagtcggcgggtatacggaacatgaccggccgatcttaatgtgtgtcgtcggtcagaccgaattcacaaaactgaaacaaatcgtcaaacaaattgatgagtcagcctttgtcattgtcgcagacgcaagcgaggtgctcggcgagggtttcaaacgcgcgtaaacgaggttataatagcgaaggggtgcatcttacatatgaaatcaaaatgggcgctgctggcgctggttctgaccatgtccgtcctgctggcggcatgcggcggatccaatgaatcgaaaaaagaaagctctgacagctcaggcggatcaaaagcatctgcgtcagcgggtgaagaactttatcagcaaagctgtatcggctgtcacggtaaagacctagaaggcggcggaggtccgaatttacaggaagtcggcgggaagtatgatgaagctaaaattgaaagcatcattaaaaacggacgcggcaatatgccgagccatcttgtaaatgatgaggaagccgtgaagatcgcaaaatggctgtcacagaaaaaataacagaaaaaccttgcctgttataggggcaaggttttttctcggtctgggaatgaaaagaaactgtaatagtaatatgtctaaatttgacgtataatgaagtgtactgaggaaaaggaactttcagatttttcatctgtttcctgacgaatcggccataaaccgctgtatgtttgcgaactctatggctgcaagacataaataaaagattaggtgatttcatgatagagatgaaagaagtatataaatcctatccgaacggtgtaaaagcgattaacgggctgtcagtcatgattcatcccggggaatttgtatatgtcgtaggaccgagcggagccggtaaatctacttttattaaaatgatttacagagaagaaaaaccgacaaaagggcaaatattgattaatcataaagatctcgcggctgtgaaagaaaaagagattcctttcgtgcggcgtaaaataggtgttgttttccaggatttcaaactccttcctaaattgacggtatttgaaaacgtagcgtttgcgcttgaggttatcggagagcagcagtcagtcattaaaaaacgcgtgctcgaagtgctcgatcttgtgcagctgaagcataaagcgcggcagtttcccgaccagctttccggaggagaacagcagcgtgtttccatcgcaagatccatcgtcaacaatcctgacgtcgtgatagctgacgaaccgacgggcaaccttgatccggtaacatcatgggaagtgatgaagacgctggaagagattaataaccgcggaacgaccgtcgtgatggcgacacacaataaagaaatagtaaacaccatgaagaaacgggtcatcgcgatcgaagacggaattattgtgcgtgatgagtcaagaggggagtatggttcttatgattaaaattctcgggcgccatttgcgtgagagttttaaatctctcggaagaaacacgtggatgacatttgcatccatcagtgccgttaccgttacattgattttggtcggcgtgtttttagtcattatgctgaatttaaacaacatggctaaaaatgctgaaaaagaagtggaaattaaagtattaatcgatctgacgtcaaataagaaaacgcaggatacgctgcagaatgagataaaagacatttcaggaatccaaagcgtagagttttcatctaaagataaagagcttgatcaattggtcaaaagcttcggcgacagcggaaaggccatgaaaatgcaagatcaggaaaacccgctgaacaacgcgtttatcgtcaaaacgacagatccgcatgatacgccgaaagttgcgaaaaaaattgagaagcttgatcatgtgtataaagtgacatacgggaaagaagaagtcagccgtctgtttaagatcgtcggggtgtcacgcaacatcgggattgcgttaatcatcggccttctgttcacggcgatgttcttaatttcgaatacgattaaaatcacgattttcgccagaagaaaagagattgaaatcatgaagcttgtcggcgcgacaaactggtttatccgctggccgttcttcctggaagggctgctgctgggggtattcggttctgtcataccgatcgctctcgtgctgagtacgtaccagtcgatggtcgcttgggtggccccgaaagttcagggatcatttgtttcacttctgccgtacagtccgtttgtgtttcaagtatcacttgtgctcattctgatcggcgcggtgatcggagtatggggaagtctgacttccatccggaaattccttcgtgtataaataaaaaagccagtctgatacagactggctttttttaatggtttcgttactgaatgacgggcagggccggtgatccgggctttaatgtaaagtcataagacgattcgtcacggtacatcgggtccgcataaatggaatccgaatcgtttgccgttccttttcggtacgctgtgaatgaatcatattctctgttcttccaattccagatgccgtcttttccctcttctttgtgatagacgttatgattaacggtattttcttcgtttttcgtaaaatcatttgcgataaaaatccgtgaatcgcttgccgtcatgatgtttttttcgatcgtgttcccttttgtgccgtactgcaggagcagctggccgccgtcaaggtccttcgtgtcatttcggtacatgatgttgtgagcgatcaccgaattgatggtgccgccgcgtttcgtgtcatagcctccgattgaaataccggtgtatgcattgccgtacaccttgttatccgtaatccggatatctcgtgcgtatttccctttatgctcagaggtggcttcaatcccaaggtcattgttgtaaacggtgtttttcttaatgtccacatgttctgcgccgtcaacgtaaataccgcccgctgaatattcatctccgtaagcgggatttccgtaagaagagttatggctcaccgtattgttttcaatgacgccgtttcgcgcatagtcgttttgcttggacgttccttcgtatccgatcacgtcaatcccgatattgttattgtcccggatggtattgccggcaatcttaaatccgtcgacattcccgttcagcacgaccgcttcgcttgcgccgagcgtcagtttttcaaccgtattatttgtaatgctgacatccttcatggcacctgtgccgtaaaatgcgatgccgtgtgcatttccttcatcagccgtggttttaatgttccggatatggttgccgtcaatgttgatatgactgcttgatccggtgacgcagatccccatggccgtcgcatcttctgatgatacggagagattctcaagcgtaacgccgtgaatggtaatgtactgtttattgcggatttgaattaacggagtttcagaatcgctttttggcgcagatttgccgctgattgagacatgctcattctgatagttccgaaatgtaatcggcttttcggccgtgccgctgtgctttacttcaaacgtttcatcgtacgtcccttcccgaatcaatacggttgttccggcctctgccttttcagccgcatgttttaatgtgcggaacggcttttctttcgttccttcatattggtcgctgcctgcgggagaaacatacaaggcgtccgtctgcgctttctcattggcctctgtttttggccagacaaaggcggtaatgcctgcggccagaaccgccgcggataaaatcgataattttattttcatatcgcattctcctgtatatttaatgaattgcatacaaaatattatacgttacccatatatatgaaacaatctcgctttttcatttttttgttgccgttacatgaattctttgcaatttacacatactatctccaggttttcgttaaaggactaagaggaggtaaacgatgaagcagaaaatgatcgcagtgatagcggccctaagcatgatgtgcggcggagcccatattgccggggcggcacagccgaattcatcagacgcagaaagaacccgggcaatggaaaaaatcgaaaaagcatatgagctgatctcgaacgaatacgtggaaaatgtagataaagaaaagcttcttgaaggagcgattcaggggatgctgtctacattaaacgacccttattccgtttatatggacaagcagaccgctaagcagttttccgattctcttgattcttctttcgaagggatcggcgctgaagtcggtatgaaagacaataaaatcattatcgtatcaccgtttaagcaatctccggcagaaaaagcgggcctcaagccgaatgatgaaatcatcagtataaacggcgtgtcaatgaacgggaaagatataaacgaagccgtgctgaaaatcagaggaaaaaaaggatcgaaggtttctattaaaatacagcgtccgggtactgaaaaacagctgtcattccggattaaaagagcggaaatcccgcttgaaaccgtatttgcttcccgcaaagaatcaggcggtcatcatgtcggctacatcggcatatcgacattttccgagcataccgccgaggacttcgccgcggcgctgaaaaagcttgaaaaacaagggattgacggtctcgtccttgatgtaagggggaatcccggcggctaccttcaaagcgtcgaacaaattttaaagcatttcatcacaaaagacatgccgtatatccaaattgcggagcgtaacggcgataaaaaacaatatttctcaaccttaaaacataagaagccgtatcccgtcaatgtcattacggataaaggaagcgcctccgcttcagaaattcttgcgggcgcgttaaaagaagcgggacattatgacgttgtcggcgacacttctttcggtaaaggaacggttcagcaggccgtgcctatgggagacgggagcaacattaaattgacgctttacaaatggctgacaccgaagggcaattggattcacaaaaaaggcattgctccgacaatcgctgtgagccagccggattattttgcggcgggaccgcttcagctgaaacagccgcttcagcctgatatgaacagcgcggatgtcaagcacgcccaaatcctgctgaaaggcctaggcttcgacccgggcagagcggacggctatttcagcaaaacaatgaaaaaagccgttctggcgtttcaagaccggtacaagcttgataaaacagcggtcattgataaaaagacagcggaaaaaatgaatcagctgatgaatgaaaagaaatctgacgaaaaaaatgatttgcagctgcaaatggcgttaaaatcattatttgtaaaataaatgaaaaggaggcgttttttgcgtctcctgtttcttttgtcattcataaaaagtgaaccaaaagacatataattatgacggttttgacaagatattaaaaaaattttcacatttaaacatttataaaggacaaacattacccgatatttatagagaagagagactttatgccgatttaatatgtattcaaaatgaaacttttgaaagttgcctcagtcagttttagttcttacaataaaagaaggttctaatagagaacagttttagtttggcagctgcatttcagtatcgaaagcagaagtgtttgcggcgcttcagcacggcagctgtaatcacccgtgcttatctggataaaaaaatgggggttcacaattgaagagggcaagtattgtgcgtgaaaaaaaatattatgaattagtggaacaactaaaagacagaacaaaagacgtcacattttcatcaacaaaagcactaagtcttcttatgctgttcagcagatacctggtcaattacacaaatgttgaatgcgttcacgaaatcaatgaagagtgtgcgaagcattatttcacttacttaatgaaaaaccataaacgtttaggaatcaatctgacggatattaagcggtccatgcttctgatcagcggcgtgatcgaggtggaggttgaccactatctgaaagatttctctctctcaaatgtaacgttgtggatgacggaagagagatagacgtttgagatattcaagccaatgattatttggtagaatagaattaaaatgtttggcttgaggcggtgaaagcagtgtctgttcaatggggaattgaacttctgaaaagtatcggtctgttttttttgcacccgatgttctggttttttatcatcataagtctcgcatgcggatatttgcggatcaaacgtgaacgccatacgtttcatacaaagatcgcggatatgtatgacgagcttatctttacatacataaaaggacttataccgggtattcttctctccatattattttttggacttggaatttcgattccattcggtcttctcggcataatcgcggctgtgactgctttgctttcgctgacgttccgtatgaattggctgtcctcagcttatattgtcagcgccggcatgttcattgcgtttatccttcagtatacccacacagtgccgtttgcggatcggtttccgcaggcattcggcgtgaattgggcatcggcggccgtgtttatgggccttttgattatcacggagggagcggctgcctgccgttcagcgcatctgaaaacatctccggcgcttgtcgtcagcagcagaggcctgcccatcggccgacaattggcgaatcgcgcatggctgcttccgcttttcttattggtgccgggcagcgggcttgagtcacacctttcttggtggcctgtctttaccgtaccgggcggctctttccatttgatctggattccttatatcgccggcttcggacagcgtgtgcaggggtcacttccggaagtcagcataaggataacggcgaaacgtgtcatgattctcgggttatcgtgaccgcattcggggcagctgccctttggtggactccgcttgccggagctgccgcttgtattgcggtgctcggacgcctgtttttatcattgagacagcggctgaacgataacgcggctccgttttatttctctaagcgggatcagggcttaatggtgctcggcatcattccgaatacacccgcggacgatcttgagctgaagatcggtgagattattacgaaagtaaacggcatccccgtgaaacatgtatcggatttttatgaagcacttcaaaaaaaccgcgcatttgtaaaaatggagatcatcggcctgaacggtgagatccgttttgatcagcgcgcgtcctatgaaggcgaacatcatgaattaggtattttattcgtgcaggatgaacacgagcacgaagaaatgacagcattataatgtgatttttcataattattcggaatagtttcaagaactcctaaactagatttcaaaatcagttagaaagtaaaacagctaagaaaattatattttcttagctgttttattttgaaataataaaaaaataaatgaaggagaggtatggcttattggaaaggttattgctaactccaaaacctttagaagatgaatctttagcaggatatatattaagaataactgattataatggttatgttggatagggggagtacattataaaaaagcttttacttaagagattaccgttgatttcacttggagttatagcttacatactgacaaaatacgcgcagaaccatcaggattgggcggaaaaatacagtaggtctgtatatccgttattgtcaaaaatagtaggatttgtaccttcttgggtcaagttttctgttagtgaatggctcgtcgtgttggttgtgttactttttctattttatatcgtttattatgtgcgcaaggttatcatgagtaaaggtgtacgtaggatggtagtttatcgtggtgctctaggaatagttacgatctgtagcgtgatatatttttgttatactattttgggtggaataaactattacagatattcttttttgtcttataccgaatataaagaagagaactacagcaaggaggaactggtcaaattgagtaagtcgcttgccgttgaaatggaattggcaagggaaaagttagcggacactgatcttttggctcaagtaccagaggtttttgattattatgcacaacacgcagtgttctcgatgcaaatgttatcaaaggaatatcctattttggagcattctttatactcaacaccaaaaccagttgtgatgtcaaagctaatgtcgcatgcagggataaatggcatctttgtcccttttacttatgaatccaatatcaatgttaatgtgcccgttttcttggtgcctgctactatggcacatgaattggcacatcagagtggtttcatgcatgaggatgaggcaaattttatagcatatctggcatgtaagcagcaggatgatccaatgatactttacagtggtttttttctagcatttgtttattctatatctgagctaaagaaagtggatccagatcaggcgtctgatataatgtccagtctgtccaaggcggtgcagcatgatatagaacaaaatgagcagtaccgggataagtatgagggtgttatttcaagtatttcaagaaatgtaaatgatgtatatctgaaggcaaataatcagacagacggtttgaatagctatagtgatatggtgaatttgttgctggcagagcagcgagatagagaagtacaattaaatgtatcttgaatacttataggtttatatagtaatgatagtgggctcaagttgaacataggagtgagtgaaataaataaaataaaagacggcggccgggctttttacggccggattacgatgtcagcgccgaacttgatcggaactctcagccatttacattccccttttctcttgtaaatcaaaagattcttatagagcaaacggcattgcggtgacactttgagagagaaaatgaagaaggaaaactagaaaaggttccggaaagctgatgcttacggaacctttttcgttatgccgaatggctttttttcgtctgaacggtttccccggacttaattccaagcgatacgaacaagccgatcacagaaactccgatcaatatgataaacagaatatgaaacccggagattaaaccgatcagtgctgaagaaataatgcttccgaaataacggaaggtggagaaaatcccggatgcgatgccggacatgcccggttctaccgtcgcaagagaagatacctgcatgctcgtcagccccgcacctgacgcgatgcctcctacaataagcgatgccataagaaacggaacggaatgggaataaaccaaaagcagaaataagagattggctgcggccatcagcccgaaggacagaaaaatcattcttcgcgcgccccatttctgatgcagctgagctccgccccagttgctggcggacatgaaaacagaaaagactgacagcgccatgccgctgtgcgacgtgttcatgctgaagtggccggtcataaagagcggcataatcaataacacggcgtacatcattaaattgcttaacagaaccgacagattggcgctcgtaaaggtcgtgtttttaaacaggtcaaaatcaataatcggatgtttcgtgcgcagttcccgcctgaaaaatagcggaaccaatacgagaatgagcagcgcgtacacccaatagcccaaagagctttcatttttcgtcagaagaataatagatacaatgcttccggcaagcaaaacggacccgatgatatcaagcggagcgtcagacgtttcttctttatatttaggaaacatcattaatgccgtcacgagtgcgatcgcaagaaacggaatgttgacccaaaagatcgaatgccagctgaagctctcaattaatagagagccgataaacggaccgagagctgcgcccagcccggcgccgaggccgaaaaagccgaatactttcggaagccgtttttcagacacgacatggcggatgatggcgatgctgtttggcgtaagcaaagcgccgccggcagcctgaagcgcccggaagaaaatcaataagaaaagacttggcgagagggcgcaccccaatgatgcgatgagaaaaaggccgacgccccataaatacatttttttgtttccgtacatatcaccgagtttgccggcaatgggctgtgtcacggccatcacgattaaatacacggtcactacccatgtgatgctggcaattgattcgctgaatgagcgggaaatggatgaaagggcgactgcgatcatcgtagaattgatgggaacgagtatggctcccagcaaaagcgaaacgatcagcgcccattctttctttgaacccatccttcatcctccttggagccggaaaatgaccggccggtaatgcctttcatgaaaatctcagtgctgtgtttcagcatcgtttcctcagagagagtaatgactcttttccccagctgcagccggtgtataaaataaccgaaaatcatcgtcataaagacgtctgcattagcttcttcgctgccggggcttatcatatttttctttgtcagctccttaaagtaaacgattaaatgctttttcacggattgcggatatacgacaatatcctgcaggacgtcttcgaatagttccggttcgcgcaggcagatgcggaacacttcttttttttgttccaattgctgcagaagggtcgtggcgaaatgaagaagatcctcatacagatcgccttccgccttggtgatcatgctttccggaaccggcgcctgctgttcaatcatggctttcattaatccttgtttgtttttaaaattacggaaaatcgttgcttcgcttacttttgctttttctgcgatttcctttgttgtcgctgcgcggtatcctttttggatgatcagattcatcgcggcgtcaataattctcttgttcgtcgttctcaacatgtttcacctcgcgtaaatactggcaggacaagtatacacccgccctgcccgtcaataaagagggaaacctagcatgaagcgcgtttgacaattgtaatcttgccgtttgtcccgtctaccgtgacgatatctccgtcgttgagcctgtcagtcgcggcacgtgtgccgagaacggccgggagcccgtattctctcgcgatgatcgccgcatgtgacaggatgccgcccgtgtccgtaatgacggcctttgcatcctggaacagactggtccaaagcggtgtcgtcattttgcagacaagcacgtctcctgttgaaaaacgggaaaattcacttgcgtcacgaatgactttcaccggtccgcttgcgattccgcttgacgctgcaagtccgtaaatttgatgttcagtgtttttttcatcttctgtgatggagccggtaatctgttcagccgttttcagctgttccgaagtcggagtcccgagataagcgggggcttcaagcaattgatattgcttgaagagccgttttcgttcagcggctttttcctgcatcggaaccggcgacgccagcgctttctcgacttcatcgctgtataagtaccacatatcctcccgatcatcaattacgccttgtttttgaagcagctcgccgattttcagaaggcaaaggcgcgctttggcgtccagcatcgcatcaatataaaaatggtgatcatctttgatgacggatgaagacaatgtccactgataatagcggtcaaacgtctcccggaagccgtcatcttcaattctatccataaagtcggcgtagagctgttttcgtttttctatcgttttatgaaactcactgtcaaaatcgtatccgtttcggacatagttctgaatgttggccaaagcgaaataagggttttccgcccaagtttcttcaatgagatcatgacttttcacggatctccagccgtattcctgtaaaaattcgccgacttgttcaagaaagcgttttccctcatttgattgcagaagcgtctgatgcagctcatcggcatgagaaaccgtaaagacgcgccgcagctcagggctgtcttttacttgtccggaaagcagccagagctgtctgtcggtctccaatgacttattcatgacgccggccagcatttcatacagaagggaggtgttttctttctcaacctgtccgtacatagattccagtatcatgtttaacgcaacctgcggaaagacaatattgaaatgttctgcgtatccttttaaatagaagtcttgcaggtttcggaacgcatcaatggcagtctccggcgtatggtctgtatgcgccagttcgtccagcttttgataaaaaggcagaaaggtttcctgaataatattgtacatgcggtcagccaagacggggaaaagcgcttctaactgttctgcgggcagcttgtcgtccgtcttatgctgtctggaaaaaacatggccctgatgaagtttgacacgctcaatctcgatgcccatcacagggaaggccttcgtgctctctttgagaccgtattccaaagccggcacaatgagtgaagcgaataacgggctgacgggaccttctatattggactccatattgagccaaaaatctttctgatcccggggcgtcatgataaattcccgttcttcgtctgccgctttctgatcctgcgcgatcgttgtaatcggtctggcctgaagcagatagagcttattttcggcaaatccgaattcgagatccacgggataaccgtacagttcctccgtctttatcgtcagcatggcaagctctttgacgctctcgtcatcaaggcagaagcggtttctcatgtcagcggacgtctctttttccgtcacgccttcgtctttagagacgatatacatttcttttaagccgatttctttttcaatctgaaatgtgtctttattgacgataaatgtgtcgggcgtcacgctgccggagacgattgcttctccgaggccgtagctcgcgctgatcatcagttctccgtcatcatgtgtgacggggttgcggctgaaaatgactcctgaaacctcggaattgatcaaaccttgcacgacaacgcccattaacggttctgcggtgtcattgttcattttctctttataaccgctgacccgcgccgagaagaaggaagcccagcactctttcacttttccgagaaactcttcttcagttttgatatttaaataggtttcgtactgtcccgcgaaagaagcgccttcaagatcttcggacgcggaggaggaacgtacggcgacagaggcgtatgattctctcaattcataaaacgatgcggtcagctcctcccgaagctcttttgaaaacgtgccgttcataatggcgcgctccagctgttcctgatctgcttgaagcccgttgtcttccataaaacgtgtcagggcattcgtctgaatgataaaaccgccgggaacgggcagcccgtttttcgtcagtttaatcaggttcattccttttgctcctgcagagcggctcgattcttccgctttttgaaatcgcactgaatacatgcggtatgaccccctttttttcttcatccaagaaaatgatagtaaacactatcattacattgtaaagagggaggaagaaactgtcaaagatacaaagacctaaaccttctcatcctttcggctgaagaaaggtaattcgattcatctggttaatggttcaatggatttatattcacattttctttgacagatgattgaagactgccgaaaaagggtattgtgatagcaggggaacgattgtccgattcttcattttttactataatcagatgagatgaagaattcccgaggagggtttttgtgattacaaaagccgtttttgcattatgtttcccttttatgctggtcgtcctttttacgcgcgtcacgtttaaccactatgtggcgatcgctctcacagccgcactgcttttcgcatcctatttaaagggttacaccgaaacgtattttatcgttggattggatgtcgtatcgctggtggccggagggctgtacatggccaaaaaagaagcagacaaaaagaaagacaatgcctgacatggtgaatatgaaatagaatgcctgcttttacgccataaaagcaggttttttatacaaaaattgacttggtaaaaataaaccatcgaactttagttcgtatttttagtgattttgcccgtcattgtgttactatatcaataggaagatttcgtaaagaaacggaggcttttttgtgaaagatcgttttgagttagtctcgaaatatcagccccagggagatcagccgcaagcgattgagaagcttgtcaaaggcatacaggaaggcagaaaacaccagactctcctgggtgcgacagggacgggcaaaacctttaccgtgtccaatctgattaaagaagtgaacaaaccgacactggtcattgcccataacaaaacccttgccggacagctgtacagcgagtttaaggagtttttcccgaacaacgctgtcgagtattttgtcagctattacgattactatcagccggaggcgtacgtgcctcaaacggatacttttatagagaaagacgcaagcattaatgatgaaattgataaactgagacattccgcgacatcctctctgtttgaacggagagatgtcattattatcgcgagtgtgtcatgcatatacggcctcggttcgcctgaagaataccgggaaatggtcgtgtcgctcagaccggaaatggagattgagcggaacgagcttctgagaaagcttgtggatatccagtatgcccgcaatgatatcgactttcagcgcgggacgttccgcgtgcgcggagacgttgtggaaatcttcccggcttcccgtgacgaacattgtatcagagtggaatttttcggagacgaaattgagcggatcagagaggtcgacgctttgaccggagaaattctcggcgaccgtgaccatgtcgcgattttcccggcttcccacttcgtcacccgggcggaaaagatggaaaaagcgattctgaatattgaacaggagcttgaggagcgcttgaaagtgatgcgcgaaaacggcaagctccttgaagcgcagcggcttgagcagcggacgaggtatgatcttgaaatgatgcgggaaatgggtttttgctcagggatcgagaactattcaagacatttgacgctccgtcctcctggttctacgccgtatacgctgcttgattattttccggacgattttatgattgtcgttgatgaatcacatgtgacgattccgcaggtgcgcggcatgttcaacggtgaccaggcgagaaaacaggtgcttgtcgatcacgggttccgcctgccgtcagcgcttgacaaccgtccgctccgattcgaggaatttgaaaagcatatgcacaatatcgtgtacgtgtcggcgactccgggaccgtatgaaattgagcatacgccggaaatgatcgagcagatcatcagaccgacgggactcctcgatcccctcattgacgtccgtccgatcgaaggacagattgatgatctgatcggcgagattcaggcgaggattgaacggaatgaacgcgttctcgtgacgactttaacgaaaaaaatgtcagaggatctgaccgattatctcaaagaaatcggcatcaaggtcaattatctgcattccgagattaagacgcttgaacggattgaaatcatccgtgatctccgcctcggaaaacatgatgtgttaatcggcatcaacctgctgagggaagggcttgatattccggaagtgtcacttgtcgccattctcgatgcggataaagaaggcttcctccgttctgaacgttcgctgattcagacgatcggacgggcggccagaaacgcggaaggccgcgtcatcatgtatgccgataaaatcacgaattcgatggaaatcgcgattaatgaaacgaagcgccgccgggaacagcaggagcgctttaacgaaattcacggcattacgccgcaaacgatcaataaggaaatccgcgatgtgatccgcgcgacgcaggccgctgaggataaagaagaatataaaacaaaagccgcgcctaaactggcgaagatgacgaagaaagaacgccagaaagtcgttgagcaaatggagcacgaaatgaaagaagcggccagagcgcttgatttcgagcgggcggcagagcttcgtgatttactgttagagcttaaagcggaaggatgatgaacacatggcaattgaccggatcgaggtgaaaggcgcaagggcgcacaatttaaaaaacattgatgtaacgattccccgggatcagctcgtcgtcgtgacggggctgtccggatcgggaaaatcatcccttgcctttgacaccatttacgcggaaggacagaggcggtatgttgaatcgctttctgcctatgcgcgccaatttttagggcagatggataagccggacgttgatgcgatcgaagggctttctccggcgatcagcattgatcagaaaacgacaagccgcaatccgcggtcaaccgtcggaacggtaacggagatttatgattatctccggctcttatacgcgagagtcgggaagccgcactgcccggagcacggcattgaaattacgtcgcaaacgatcgaacagatggttgaccggattcttgaatatccggagcggacgaagcttcaagtgcttgcgccgatcatctcaggcagaaaaggcgcccatgtcaaagtgcttgaccaaatcagaaagcaaggttacgtaagggtgcggattgacggagaaatggccgagctttccgacgatattgaacttgaaaaaaacaaaaagcattccattgaagtggtcattgaccggattgtcgtcaaggaaggggttgccgcccggctttccgactcactggaaaccgcgctccgcttaggggaaggccgtgtcatgatagatgtcatcggtcaggaagagctgatgttcagcgagcatcacgcctgtccgctgtgcggtttttctatcggggagcttgaaccccggctgttttcgtttaacagcccgttcggcgcctgcccgacttgtgacggtctcggtttgaagctggaagtggaccctgagctcgtcattcccaatcctgaactgtcattaaaggaacacgccatcgcgccgtggacgccgatcagttcacaatattatccgcagctgcttcaggcggtctgccgccattacggcattgatatggagactccggtcaaagacctgccgaagcatcagcttgataaagtgctgtacggcagcggcaatgaacggatctactttaaatacgagaatgatttcggacaagtgcgcgaaaatgaaattgaatttgaaggtgtgctgcgcaatattgagagacggtataaagagacaagctccgattatatccgtgaacagatggagcagtacatgtcacagaagccgtgcccgacgtgcaaaggctaccggctgaagaaagaagcgcttgccgttttggtcaacgggcgccacatcggcaccattaccgagctttccgtcggcgatgcgctggaatttttcaaaaacctgacgctgtctgagaaagatatgcagattgccgatttaattttaagagagattgtggagcgtctcagctttttagataaagtcggtcttgattacctgacgctgagcagggcggcgggaacgctgtcaggcggagaagcccagcgtatcaggcttgcgacgcagatcggctcccgtttgtcaggcgtcctgtacattcttgatgagccgtccatcggccttcaccagcgtgacaatgaccgtctgatcagcgcgctgaaaaacatgagggatctcggcaatacactgattgtcgtggagcatgatgaagatacgatgatggctgccgattacttgatagatatcggcccgggcgccggcattcacggcggccgcgtcatatcggcggggacgcctgaagaagtgatgaatgatgcggattctctgaccggacgttatttgtcaggggctcaattcatcccgatgcctccggagagaagaaagcctgacggccggttcattgaaatcaaaggcgcttcagaaaacaacctgaaaaaagcgaacgccaaattcccgctcggcacttttacggcggtgacaggtgtgtccggttcgggaaaaagcacgcttgtgaatgaaattctgcataaggcgcttgcgcaaaagcttcataaagccaaagcgaaaccgggaagccataaagaaatcaaaggccttgaccatcttgataaggtgatcgacatcgaccaggcgccgatcggccggacaccgagatcaaatccggcaacttacacgggtgtgtttgatgatatccgcgatgtattcgcgcagacaaatgaagcaaaggtgcgcggctataaaaaaggccggttcagttttaatgtaaaaggcgggcgctgtgaggcctgccgcggcgacggcatcatcaaaattgagatgcacttccttcctgacgtgtacgttccgtgtgaagtgtgccacggcaaacgttacaaccgggagacgcttgaggtcacatacaaaggaaaaagcatttccgacgttctggatatgacggtggaagatgctctgtctttctttgaaaatatcccgaaaattaaacgcaagcttcaaacgcttgctgatgtcggacttgggtatgtgacgctcggccagccggcgacgacgctgtcaggcggagaagcgcagcgcgtcaagctagcttccgagctgcataagcgttccaccggccggacgctgtatattctggacgaaccgacaacagggctccacgttgatgatatcgcaaggcttttggttgtgcttcaaagactcgtcgataacggtgataccgttttggtcattgaacacaatctcgatatcattaaaacggcggactacatcgtcgatctgggacctgaaggcggagcgggcggcggcacgatcgtagcctccggaacgcctgaagaagttgtcgaagtgaaagaatcatatacgggccgctatctgaaaccggtaatggaacgcgataaaaaacggatgaaaacattgctggccgaaaaagaaacggcagccacgtaatagatcaataaaaacagcccaaaactcatcggttttgggctgttgttgttacaggctttttttctgttggggaagctgtctgcttaaatgcattaagtcctgcagaatatgggtgctgctgctgtccagcagcacttttatatattggatatcatgggaaatgggaagaggggctgctttgatctgttctaattcagccagcatttcgctgttcattcttttctgttcgcgaattaaatttcgaagactctcttccgttacttgggcgttttcgggatctttctccatttgtatgtcctccttgcatacggtcaggctttgttacatattgtaatcggttcggggaaaagattctatagtgaaatctctgaaaccaaaaattacgtataacgaagcatgtccttagcatgaaaatgaaacccgctcattcgtcatacgtatgtataaggaatggttttttatatcatggcacagggagtgtttttattgaaccgaaatcaagcgattatcgcatcaatctgttatttcagcgtgtttctcgcgccgctcattcttccgattgtggcttactttgtcgtcgatgaaaaagagacgaagcggcatgccatgcgcgctctgatttcccatatcattccgtttgcgggcttgctgattgtgaccgccggtgttgtcggcggattgattacggcccagggggagagtatggtgcccgtttttgttatgataacaggagcagctgtttattttctgatcctcatcggaatggtcatttggaatatcgtgcagggaattaaggtgttacgccaggtgtaagaaaagtcgggggaggagttttgtatgaaacaggagaaagaacggattttaaagcttgtggaagacggcatgctgacggcgcaggaagcactgacgctcattgaaaaactggatcatgaatataaagaaaaagaagatcagatcaccgcattatctgcggaggttcaggaacctgcggaagatttcgaaagcggtgcaaaaggaagccaaaagccgtcgctcggggcgaagctgttcgactggattgattctgccgtcaaaaaagtgaaggaagcggatcttgatctgaatttcggccacgcacacgaagtgcagcatatttttcaatttaaagacagtgaattctcggccattgatatgcagattgcaaacggcagcgtcaatatcgtgccgtgggcggatgaagatatcagagcggagtgccaggcgaaagtgtaccgggcggacagtcaggaggcggcgcgcaccgcatttcttcagcatattgagtgtgaagtgaagggcaataagttttttgtccgcacggaaaagaaaacgatgaaaaccaatgttacgctttatgttcctcagaaagagtacgataagataagagtgaagctgtttaacggaccgatcagaggggaacatttacatgtaaaagaattctcggcgaaaacgacaaacggcgttctgtcattctctcatttgacggctgagaaagcgtcggcggaaacggctaacggacaaatcaagctggccggacatcaatgcggcgcgattgaagcggaaacgatcaacggcttgattgatttgcgcggatcgagtgaatccattgacgttcaaagctttaacggcaatatcatgcttaccgtgacagcgccgcactgccgctccatctacacgaaaacgacgaccggaaacgtggagatcgccctgcctgatgattcggcggtgaaagcggagctcaaaagcaatctcggctctctcagccatgagctgattgatgcggaaattttaaaggaaaagaatgataccattcaaaaagaactgatgctggcatcaaatcaaggccatgatcagcatctctcgattttctcagaatcgttaacaggagccattaagctcaagcatactcagaggtgattggatgaaaagactttaccgttcagaaaaaaaccgtaaaatcgccggcgtcgtcggcggtttggcggagtacatcaatatggatgcgtcgcttttgcgcattatcaccgttgtattagcgcttgtcacgagcggaatcgtgccgattgtatatattatctggtgttttgttgtacctttagaaggagatttgaaataaatgatcaaatgggcagtcagcattttagtaaatgctttattattaatcgttatcgcgggatattttgattccgtccatatcagcagtatcggagcggctgtcatcgccagtgtgattctttctgtgttaaatgtgctgatcaaaccgatcatcgtcatattgacattgcctgtcacggttgtgaccctcggcctctttctgtttgtcatcaacgccattacgttaatgatgaccgcagccttgatgggagacagctttcagattgacgggttcggcaccgccatttgggcatccgtcgtgctgtccgttttccacttgctgatccaaaaaggcatattggagccgcttagaaaaggataaaaaacaagctgtcccgagagggcagcttttttatgtgcggtttacataagcggcagcctcctgacgcaacataatgcatagggaggtaatgagatgaaacttgtgatgacgctcttttttctgattggtttgctttgtgtgagtccttctgcggatgcggcgcgcaaagaatcggcaatccccgtgaatcagcaggaattcggacagccgcctcattacataccgcttctggagaatcctccccaaatcgaagtaaaggcggaaatgaaaagaaacctgttcatacaggctcatgtacggaatgctgactatcaagcgttttcggcgtttcttttttataaacaaagcaatgagctggggtttaagatggtgccgatggagcccgcgccaggcgcaatccggctttttacggcccaggtttcaaaacgggatatctggaatggagaattggaatattacctcgttttcaccaacggcagacagcgggcggaatcggagaaaaagcggctgaagctggacggctatcaagccgatttgaatcatattcccgagctgatgattacggagcttgcggttgatacgaaaaatgaagatggcgctgatgcctatgaatttatcgaggtgtataacacgacggacaggcccattcattttaaagactatcatatccgctaccgctatccgaaggaagggccggaatcagatatgatatggaggccgaaagaggataccgtcattccgtcaggcgggacttacgtgttttggctgagacgcgccgcatcagaactgacgatagatgatttcaaccgctattacgggacacgtctgaaggaaggagaacatctcgccgtcatcgaagggacagacggaatgtccaacggccgcccgcgtacggtcgtgctgtcggcaaataccggcaaggatatcgcctcagcgcaataccggaaacacgctttccgccggctgacttctttgctgtacaaatatccgctgaacggaacgggagaattgctgaagatctccacgagcgagcataagccgtcaccgggctccgtttttcaggcgcagattccgcagcagaaaagggtgatcaaacccgacaaggaaaaaccggtcatcgaagaccttacagacagaaagcccgtccggcccgctgaaagcattgaattaaaggctgacataaaagacaaaaaccttgtcaaaacagccgcgttttattaccggaccaatgagaaaaaaccattcaaacgaattctggccgaaaaagaccgcaacgacagcttataccatcacattctttattccccggaactgctcggccaggatcagcttgagtattatatcgcagccagtgatggagaaaatgaagcaaaaacgcccgtcaagatgattgacattgaacagacgagcaaatcacacggactcagaatgaatgttgaaccggaagatacgatatccggcacctatctgctcaaagcgacttccgacgtcagcgccgataagatcaagctgtggattgacggcaagcggcaggagacccggccggcgctggaaaaagaggtctatttcgccttcgatgcccggaaaacgaatctttattttcaaaacaccgtcatgatggaaaacgaggtgctgcacatttttgacgatccgtctcaccgctacagaacgcactcggttctgcttccggaacgtctgctgctaaaagggggcaaaacacagaaagtatccatccgttcgggctcaaaggtttctccgtatgacacgggagagaatcgggatgattttgtcgtgaaacatgcccgtctggtgctttcggacggaacggtgatcaaagacgggaagacggacccgtccgagcagctgtttatcggtgacggcaagcgggcgaatcagcagaagaccttctcattcagcctgccggatcatttgtttacgtcacggctgctgccgtggaacacggcgaagctttcggaaggctatcaccatatttttgtcagtgacggtgaggagcagctgagccaatctgtgagggtggacaattcggggccgaagattgtcccgggtattaaagaaggcgcggcgctgaaaggtaatgttgagctgaatgcggacatccgtgataaatggagcaaagtggaagaggtgaaagcgtttttggacggagaaagcattacgctcccgcatcacacgtcatcagccgatctcaagcccggaaagcacacccttactatcattgcggcagaccttgccggaaatgaaacaacgtccgtccgcaccttccatatcaaacgggaggagccgaaccagccggagcttgccggtcaaaaaatcggcgcccgcaaagcaaagctgtccgtccgggtaaaagacccgacgaaggatgacatgaatgtatcattttatcgcggcttccgttataccgcgcggaatccgggcagcgtgaaagtgtataaacacgcctcattaacggaaccgccgaagggcataaaagaaaatgaaatgccgtttaccctgccggaaatgaaccgtatctcggcaaatgacggaaaaaccgtttcggcggaaagtgtggagcgttttccttatcaccggttcgaagtctccgttgacccgtctatcgacgaaacggatctggccgaggcggtctggaaaggaagctctctgcccggccgaaaggtaaccatgtatatttggaattaccggacaagccgctggcaggaggcggacagcgtccttgccaaagataaaaagccgtttacattaaaagccgccgtttccgcagcggatgtggtgaagaactcaaaaatgaatgtcatcgtgcaggatcaaataccggcgaaaggcaattacacgtttgtctggatgtcggatacacagtattacgcacaagggcacccgcacatttttgacaaaatgacggagtggatcaaagaaaataaggaaaagcacaatattaaatatgtctttcataccggtgatattgtcgatgattcaatggtgatgaaacagtggaaaaacgccgatcactccatgcggacgcttgacaaggcggggattccgtacggagtgcttgccggcaatcacgacgtcggccataaagacggcacataccgaaccttcggggatttcttcgggagccgccggtttgaacagaacatgcattacggcggatcatacaaaaataaccgcgggcattatgatctgctgtcggcaagcgggaacgattttattatgatttatatgggctggggcattacggaacaagagattgactggatcaatcaagtgctgaagaggtatccggaccgaaccgccatcttatgctttcatgagtacttgcttgtgagcggaaatcgaagcccgatcggggagacgatctatcgaaaagtcgtcaagccgaatcgcaatgtggcgatggtattaagcggccattaccataacgccatgaaaaaaaccgatgcgcttgacgatgacggagacggaaaaccggaccgcctcgtccaccaaattctgaccgactaccaggacggtccggaagggggcagggctttatgcgcataatgcaatttgatcaggccgccaatcaggttcacatgttctcctactcgccgtacacggatgacatcaattactatgacaccgatctgttcgctgataaagacgaattctcagcagaaatggatttacagccgaagaggaaaagggtagcgactgattattttgaatgcaacgtttatacgaacgaactgctcggtcataaaaaacacgtaaaaagcggaaaaaccgcaaattgggtctgggacggcctgcagcctgattccgtttattactggtacaccgtcgtgaaggacccgtacaacggcaaaacaatatcaccgctgtggatgttcaaaacgggaaatacgccgtatcacccggctccggatcagtttgatttcaggcatgcctcaaacccatagcaaaaacatacacctgccgatcggtcagaagaaaatctgacggtcagcaggtttttttctgtaacatgcatggcggtaagtgtttttgacttttttatgtcccttttctatactaaaatcgattggttttcgtaatatgcaggaggaaacataatgaacagtaaaaccgggacaaaagaaagaattattcaaacctctgcatatctttttcagattcagggataccatgcgactggtttgaatcaaattataaaagagagcggagcacccagagggtcagtgtatcatcactttccaaacggaaaagaagaactcgccattgcggcgatcaaatatacgggaagatgcgttgaaaagcagatacagaatagtatgtctcaatccgcggaccctgtagaagcgattcagcactttattcatgtaacggctgaacagtttaatgatccgcagaatattgagggcgtgccggttggattgctggcgggtgagaccgctctgatcaatgaaacgttaagatgcacatgtgttgaggtgttcaagaagtggacggatgtgtttgcggcaaaatttcttgagcatgggtttgaacaagaggaagcggagaagcttgggatgacaatcaactcgatgattgaaggcgcaatcatgttttcattggctcataaaaacaaagaaccgctgctgctgatttcaaagcaggttccgtatattgtccaaaacagaggatagcattttattactcttttctttataaaaatagataccggaaccccagcctcttcgttttgacagagtcatagagaacattcaccggcttgatttgaaaatggcagatcaaaaaaacatctccaacccgtaacggttggagatgtttcatttcaccctgtccatataatgcacgaatgtgtagcggtcgcctctgtaggcggatttgacgtgctcaaaggcagtgccgtcctgcagataagtggtccgcttgatatagaggacgggggcgccgggctggataccgagcagctcagcttcttcctcggaagcggttcccggttcaagctcttgttttgcccgtgagatcggcatctgattgtacgcttcaatatgctcatacatggatgattgaaaatgggaggcatccaattttcccgccttgtcaaacgggatatacgatgcctcaatcgccatcgggatatcatttgccagccggacgcggatgattttatgaagcgttgccggatagccgcaccccaggatagaagataattcttccgtcgcctgaatcagctggtattcggcaagtctactccccggcttcatgccccggcttctcatatcttcggtgaagcttgtcagcccttgaagcggctgttccatcttcagtttgctgacgaacgttccccggcctttctgtctgtataaaaatccttcattcaccaaattggaaagcgcctggcgcaccgtcatgcggctgatgccgaattgttcggcgtattcccgctccgacggaagcagcgcatccgctttcagctcgccgtttttgatttgtgtttttaattgttccataatctgaaagtaaatcggaatcggagattgtttatcaatctgcataggtcaaatcctttcaatcgccgcccgcagccttttcatcaatcaagaccgtcacatccggatgcgcgtgcagggcggaggcggggaatgcttcgctgacgcgcccgtccagaagctgcttcaccgcttgggccttgctttttccggatgccatgatcagaatccgtttgccggacaaaatcgtcccgatccccattgtcagggctttttcagggacttgatcaattgacggaaagtaccgcgcattcgcctgtcttgtctcttcattcagctcaacaacatgggttcgggattcaaatggcgtcccgggttcattaaagccgatatggccgttgtgtccgatgcctaaaagctgtatatccgctccgccgagtgtttgaatcaatcggtcatagcgcccgcattcggcatcaagatcgtctgcccgtccgtcagggagaaagtggcggtcctttcggctgtcgatatgtgcaaaaaaatgtgtattcatataataatgatagctgtttttgtcctcgggagaaagcccggcgtattcatcaaggttgatcgtcgtgacattccggaacgacaagccttctgagcggtgcatccgcacaagttctttgtatacgccttcaggagtgcctcccgtcgcaaggccgagaacggcatccggcttttgtttcactgtttcagcgataatcgctgcggctttttcacttaattcttcataatgtctgcatgtgataacgttcatgtccaatcagcctcccttgagatatatgcggtgtttccgcggcaaatcgtggccagcacgccgcactgtccgtccgtcagaacaacgtcggcgtcttttccttcggcgatgcttcctttacggtcgaatatgccgaggcggcgggccgcatttgccgatgtcatatttgctatatccggccatgagcagtttgtaaacctgcgcatgagcgccgcgccttcattcatttttaaaatggaaccggccagcgtcccgtcagagagaagcgccgtgtccccgcgaacggtgactttttgtccgccgaattcgtattctccgtccttaagcccttttgcccgcatggagtctgtaatcatgatcaggttttggcttcctttcgccaaataggcaagcttaacagccagaggatgagaatgaatgccgtcagtgatcagctccgccgtgatgcggccgcaggcgagagccgtaccgatgcccccggctcacggtgatgaaaggagctcatggcgttaaagaggtgcgtcatatgcaccgccccggcatccgccgctttttgtaaaagctcggctcctgcgtctgtgtgtcccattgaggggatgatgttttggttttttaaataacggatcaggctgaaatcaggatcttcttccggcgcaagcgtcacgattttgatcagccctcccgagagccgctcccatttctgaaagagcccggcatcagcaggagtaatccattgtttcggctgtgctcccgcctttttcggagagacaaacggtccttctaaatgaatgccgatcaactcagcgcctttttgggtctccggtgaggaatacgcccattttttggcgttgatgagcgctttttcaatgttttcgtgctgctgtgtgatcgttgtcgctaaaaaagcggttgttccttcttcgggcagccgggcggacagtgtatcaagagccgcaacatcggcatccatcgtatccgcgccgtatccgccgtgaatatggatatcaatcattccgggaagcgcatacgagccctcgggcgccttccattccttctcatacgtttcttgcggccttgtttttcccgcgtaagaaatgatgccgtcctttataccgagaaaaccgtttcggatgatttctttttctgttacgatgtccgcaccgctgattaacaagctttcagccactttaaaacacgcctttctggttagttgttagttttattttactccttttcagactagttatctagaccagttatgccggaattgtataaatctgttttggttcagacggtaaagtgataaaatataactgttcaaagctcggaacatcccagaacaggaggaacatatcttggcaaaggttcggaccaaagacgtaatggaacagttccatttagaattgatcagcggagaagaagggattaaccgcccgattacgatgagtgatttatcacggcccggtattgaaatcgccggttattttacatattacccgagagaacgggtgcagcttttaggaaaaacggagctgtcatttttcgatcagcttcccgaggaagataagaaacagcggatgaaatcgctgtgcaccgatgtgacgccggctatcatactttccagagatatgccgatcccgccggagcttgtagaagcttccgagcaaaacggcgtgcctgtgctcagatcccctctgaaaacaaccaggctgtcaagcaggctgacgaattttcttgaaagccgtctcgcgccgacaacggccattcacggcgtgcttgtggatatatacggcgtcggcgtgctcattacgggaaaaagcggcgtcggtaaaagtgaaacggcgctggagcttgtcaaacgaggccatcgtcttgtcgcggatgactgcgttgaaatccggcaggaggatcaggatacccttgtcgggaacgcgcctgatctgattgagcatctgctcgaaatcagggggctcggcattataaatgtcatgacgctgttcggggcgggcgccgtcagaagcaataaaagaattacaatcgtcatggaccttgagctttgggagcaaggaaagcaatacgaccgtctcggacttgaagaagaaaaaatgaaaatcattgatacggaaattacaaaactgaccattcccgtccgcccggggcggaatctcgccgttattatcgaagttgcggcgatgaacttcagattgaagcggatgggcttaaatgctgccgaacaattcacgaataagctggcggatgtcattgaggacggcgaacaagacgaataggagttggcaataatatgaatgaagctggaacaccgatcaatccgattgccttgcagctcgggcctttatccgtgcactggtacggcatcattatcggcgcgggcgcgttattagggctttggatggccatgagggagagtgaaaagcgggggctgaaaaaggacatttttattgatcttgttcttttcgccatcccgatcgcaatcatttgcgcaagggcatattatgtgcttttcgagtggagctattactcggaacaccccggggaaatcattaaaacttggaaaggcggcattgcgattcacggcggattaatcggcgcgatcgcaacgggaattgtcttttcaaaagtaagaggcatctcattctggaagctggcggatattgccgcgccgagtattctgctcggccaggccatcggacgctgggggaactttatcaaccaggaggctcacggtggagcggtcagccggtcatttttggaaagtctgcatcttccggatttcatcattaatcagatgtacatagacggacaatattatcacccgacgtttttgtatgaatcgctgtggagttttgcgggcgtcgtgattctgcttctgctccgccgcgtgaacctgcgcaggggcaatctgtttttgacgtatgtgatctggtattcaatcggcagatactttattgagggaatgcggacggacagcctgatgcttacgagccagcttcggatcgcgcaggtcatttccattgtgctgattatacttgcgattattttaatgattttcagacgcatgaaggggtatgccgataagcggtatgctgacacggactgacgactgaaatcggaaaggacataagatgactgataaacatgtaaccgccattttattcgatctcgacggcacgctgattgacacgaatgaactgattatcgcttcttaccttcatacgcttgatcattattgcccggggcagtttaaaagggaagatgtacttccgtttatcggcccgcctctgtacgaaacgttttcaggcattaatgccgaaaagtgcgatgacatgatcagcatgtacagagcattcaaccataaaaagcacgatgagctcgtcacggagtacgaaacggtttatgaaacgctggatgaattgaaaaaagcgggctatcagcttggtattgtcactactaagctgagggatacagtcaatatgggattgaagctgacaggcatcggggcgtttttcgatactgtcgtcacgcttgatgatgtaaagcacccgaagcctgaccccgagcctgtgcggcttgcgctcagccggcttgggtgcgatccgtcggaagccatcatggtcggtgacaattatcacgacgtcatggcgggaaaaaacgccggcacgaaaacagccggcgtcgcgtggacgattaaaggcgcacagacgctttccgcctatgaacccgattatatgctcgagaaaatgagtgatttattgcacatcaccggagtgaagtaatccgtgagaaaaacagaccgccatccggttgcaggtgcaaattcattgtggcatgtttatcagacggttcccttcctgaaggtgatgaaaaatttcatcatcattcagattgcaaggtatacgccgtttttaagcgtgaaaaactggctgtaccgaacctttttgaaaatgaatgtcggaaaacagacgtcattcgcgctgatggtgatgccggatatcatgtttcccgaaaaaatcactgtcggaaaaaacagcattatcggctacaatacgacgattttggctcatgaatatttaatacgtgagtaccggaccggttttgtcacaatcggtgacgaggtgatgatcggggcaaacacaaccattctgcccggcgtcaccatcgggagcggagccgttgtatcagccggcacgctggtgcacaaagatgtccccgccggggcgtttgtcggaggaaatccgatgcaggtgatttatacgcacgaagaaatgaaaaaacgaatggaaaaccccgcagattaacgtcagcggggttttttatgacttgatcacaatggcctggctgcccatctgcttccaggctttttcaaagtcagaccggtctgtttttctgtttttatagccgtaaggatcattaacgtatacataatcgtgatcataaccggttacggctacgctatgcatgctgaacgtaatgtcgatctttccgttcggtgtatcccaagtctgcatatgatcaaccggcttaaaggatgtggtggtaatcacccagaccggccgccctttttcaagctggcggtacactgaagaaatgtcttttcccgtaagatcgtatactttgtttcccgcatattctttggcaagtttatcaatcggctcatgataaacgcctaaacccgggccgttttccatatctccggcaaatccttcattcggatctcccttcagcccgctgctgtatgtgagcggaactttattgattttatccgccaatgtattttttgacacatgatatccggcattgttcaaaatcatggcaaggctggtcacctcacagccattgtacagtctgggagaatccatctgtctgtacagaacgacattcagcggtgacgcgctcccttttaacggtgttttctcatcaggctcgtcggactgctgattgaaaaaatttaaatgaatatcgtttgtatagatgttatatcccagatagacaaggatggctgtcagaatcagcacacataatgttccaagcgtcttcattatcaattattctcccttgtttctgatgaagctgttctatgtattatagcacttctgctcaatatgattcgatcgttccgatatgtttacaggtttgttcattctttagccatgtttatggaaaagaataggcggacattgggcgttgcaatccattcttttatctgctaacatattatcatattagcgaactaaaggattcggaattttccttcagacaaagcggaggtgtaaaaggcaaatgtttatgtttgagaaaccgcatggcatgagagatacgctgcccggtttatacgaagccaagaaaaaagtccgttccacactgacggatttaattgataaatggggttatcagtttatggagacgccgacccttgaattctatgaaacagtaggcgtccagtcagccattgaagaacagcagctgtttaagcttctcgatcaggacggaaaaacgcttgtgcttcggcccgacatgaccggaccgattgccagggtggcggcatctaagctgcacaaacacaatcatccgctcagagcggggtacgcggcaagcgtctatcgcgctcaggagcgggaaggcggacgtccggccgaattcgaacaggtcggcgcggagctgatcggcgacggatcaacaagcgcggacgccgaggtgattgcgctggcggccggcgctttgaaaaacgcgggattgcaccggtttaaaatcgcgatcggccatgccggactcgctgatgagctgtttgtcgaggttttgggcaatgccgagcgggcggatgttctgcggcgctttctctttgaaaagaattacgtgggatacagggaacatgtcaaatcgcttccgctttcttcaatagacaaaagccggctgctcgcacttttggaattgcgaggcgggaaagagatttgcgccaaagcggaggagatcatcggaatctccggacaaagcttaattcaggagctggaagacctgtgggacattcttgaggattacggatgtgccgagcatattcgccttgatctgaatatggtaagccatatgagttattacacgggaattttattcgaagtgtacgcggcaaatgtcggtttcgtcatcggaagcggcggacgctataacaatctcctcggccatttcggcagtcccgctcccgccacgggcttcgggctccgtatcgacaggctgattgaagcgctcggcattcaggaagaaacaagtgaagcggacgccgtgattttcagcaaggagcagcgggcccaggctattttattcgcggaggaagaaagggcgagaggcagaaaagtcgtcctgcaggatctggcgggcattgaaaatatcgatcatatgacaaaatcattcgcaaacgtcacatactttatcggtgccagaaaggaagagaggaatgggtaaggtactcacaatggcaatgccaaaaggacggatattcgaagaagcggccgggttgctgaggcaggccggatacaggctgcccgaggagtttgaagaatcgagaaaactgatcattgacgttccagaagaaaatctccgctttattctggcaaagccgatggatgttacgacttatgtcgagcatggcgtcgctgatgccggtattgccggaaaggatgtcatgcttgaggaagagcgtgacgtgtatgaggtgctcgatctgaaaatcagcaaatgccatctcgccgttgcggggcttcccggggcggattggaacggagtcgcaccgaggattgcgacgaaatatccgaatgttgcgtcgagttatttcagagagcagggcgagcaggtggaaatcattaagctgaacggctccattgagctggcgcctttaatcgggcttgctgacagaatcgtagatatcgtatcaaccgggcggacattaaaggaaaacggtctcgttgaatcagaacatatttgtgacatcacatcgcgttttatcgtcaatccggtcagctaccgcatgaaggatgatgtaatcgacgaaatggcggccaggctggcacgggttgtggaaggagaaacggcaaaatgaacataaccgcagtaaaaagaagcgagcggttttcactgaagcgttccatcgacagcggaaccgaagagcagcggaaaaccgtcagggggattattgaagacgtcagacaaaacggtgacaaagccgttttggcctatacaaaaacatttgacggcatcagcctgaaccaaatggccgtgagcgcagaggaaatcaccgaggcataccgtctgcttgatgatcagctgctggaagtgatcagacaggcgattgccaatattaaagaatatcacgagcgccagctgcaatcctcttggttttaccatcgcaaagacggctcgatgctcggacagaaaataacggcgctcgattccgcgggcgtatacgtgccgggcgggacggccgcttatccgtcttccgttttaatgaatgtcatccccgcgctcgctgcgggagtggaacggatcgttctcgtcagtcctccgggaaaagacggccgcctttcaccgggcgttctggcggcggcgtctgagctcggcataaaggaaatttacaaagcgggaggcgcacaggcgattgccgcgctcgcttacggaacggaaacgatacagcctgttgataagatcacgggccccggaaatatatttgtagcactcgcgaagcgcgaagtcttcggcgttgtggatatcgacatgattgccgggccaagtgaaatcgtggtcctggcagacgatacggcggtgcccaaagaagtcgccgctgacctgctttcacaggccgaacacgatatgctcagttcaagcgtgcttgtcaccgattcacagaagcttgccgaagcggtatcagatgaggtgaataaacagcttcagaccctgccgcgcaaagaaatagccgaagcgtcgatcagggatcacggccgcatttatattacggaatcgatggaagatgcggtggacacggtgaatgagctggcgcccgagcatttagaaatcatgacgcattcgccggaggctttgcttggaagcatcagacacgcgggggcgattttcttaggacgatacagcgctgaaccggtcggcgattattttgccggaccgaatcacgttttgccgacaaacggaacggcgcggttttcaagcccgctgaatgtaacagattttcaaaagaaatcgagcatcatctcttacagccggaaggcatttgaaacgcacgcggacagcatttccgccttcgcgagactggaagggctggaagcgcacgcaagatcgattgaagcgagaaacggaggaatgaccgatgagaaaagcggaacgcgccagaacaacaaatgagacggatataaggctggctttcgaaatagacggagaaggaaaagccgacatcagcacggatgtgccgtttatgactcatatgcttgatttgttcacaaagcacgggcaattcaatttaacggttgacgcaaaaggcgatacggagatagatgatcaccatacgactgaagatatcggcatctgtttagggcaggcttttttggaggcgctcggtgataaaaaagggatcaaacggtacggatcagcgcttgtgcccatggacgaagcgctcgcccaagtcgccgtagacctgagcaaccggccgcaccttgagatgcgcgctgcatttccgcaagcgaaagtcggaacgtttgataccgagctggtacatgaattcctatggaaactggcgctcgaagcgagaatgaatctgcacgtcatcgttcattacggcacgaatacccatcatatgatagaagccgtatttaaggcgcttggcagagcgcttgatgaagcgtcatccattgatccgcgcgtcaagggtgtgccgtctacgaaaggaatgctgtaaatgatcggtgtaattgattacggtatgggcaatttattcagcgtgtcgaaagcgctggaacgcgtcggcgtcccgtatgtcgtatcagaccggccggaagagcttgaaaaagcggatgcttttattcttccaggtgtcggatcattcagtgacgccatggacaatttacgcagcacgaagcttgatcaattcatacaccgtatggttgacgagggtaagctgctcctcggcatctgcctcggcatgcagctcattttcgaagagagcgccgaaaacggctctgcaaaaggacttggtttattagccggaaaagctgtgagactcaaagacagagatgccgaaggaaacaagctgaaggtgccgcatatgggctggaaccggctgacgtttcaccaaacgtctcctttgctttcggaagcggaagaaggcttcgtttactttgtccattcctattatatagacgggatggaagacggcgatcttctggcaagcgctgagtacggcgttcgtgttccggctgtcgtcgggaaacgcaatgttttcggtgcacagtttcatccggaaaaaagcggtacagccggaatggcgatcttaacacaatttacaaaaatggcagcggaacagaaggtgaagaaatgaacgcttttacattatatccggcaatcgatatgagaaacggcaaatgcgtccgcctcatccaaggcgattacggcaaggaaacgatatacggtgactctcctttagacatggcggcgcaatttgcacaagaaggcgccgaatggattcatctcgtggatcttgacggcgcgaaagcaggcaggaaagtaaacgacaggcatgttcttgacattgcgcggcagcttgatgtcaaagtcgagatcggcggcggtatccgttctgaagcggatgtgtacggttatttatcacaaggcgttgatcgcgtcattctcggcagctcggccgtttccgatccggcatttgtgaagagcatgctgaaacaatacggcggcaaaatcgcgatcggccttgatgcaagaaacggatatgtctcgacggaaggctggctggaaacatcctcggtaatggcggccgatctgggccgtgaattggcggccgaaggagcggaaaccttcattttcacggatattgcaactgacggcatgctgtcaggaccgaacatcgaaagtaccgttcagctcgcaaaagcaacgggaaaagacgtcatcgcttcaggcggagtcagctcagtcgccgacctcaaagcactggcccgcttcaaagacgccggcgtatcgggagcgattatcggaaaagcgctgtatacaaaacaattttcattggctgaagcgctcagaagggtgaaggacgcatgatcacgaaacgaatcattccgtgtctcgatgtgaaagaaggacgcgtcgtcaagggcattcaatttctcgggctgaaagatgcgggcgatcctgtcgagctggccgaagcctacgacagggagggcgctgacgaacttgtttttctcgacatttccgcctctcacgaaggccgcaagacgatgacagacgtcgtagaacaagttgcggcaaaactggcgattccgtttacggtcggcggcggaatcaatcaattaagcgatatgaaacgaatgcttcgcgccggcgctgacaaggtatccgttaatacagcggccgttctccgtcccgagctgattacggaaggagctgagtttttcggctcgcaatgcatcgtagcggcgattgacgcaaagtatgacgaagattcggaatgctataaagtgtacacacacggcggcagacagaaaaccgagcgggaagtcacggcctgggcaaaagaagccgtcagccggggagcgggtgaaatcctgctgacaagcatggacgcagacggtgaaaaaacaggctttaatcatacgctcacacagcttgtctcacgtgccgtcccggtgcccgtcattgcgtcagggggagccggcagcgcgcgccatatgcttgaagccttcacagtcggtgaagcggacgccgcgcttgcagcttctattttccattacaaagagacatctataaaagaagtgaaagattatatgaagaaacacggggtgaatgtgagatgaaacaggcagatgaactgcggtttgacgaggccggactgatacccgccatcatacaggatgcggcaagcaaagaagtgctgacactggcttatatgaaccgagaatcctatgaaaaaacgatagaaacgaaagaaacctggttttacagccgttcacgcggggagctgtggcataaaggagcgacatcggggaatacccaaaaggtgaaagccatccgttatgattgcgatcaagatgccctcgtcgtgcttgcggagccctcaggacccgcatgccataagggaagctacagctgtttttccacggaaaaagcagacgcgcaggatcgtttcggcatcttaaatgaactggaaagcgtgatcgccaaacggcaggcggagatgcctgacggagcctacacaacgtacctgtttcgggaaggcgtcgataaaatcctcaaaaaagtcggtgaggaagccgcagaggttattatcgccgcaaaaaaccgcgaccatgaagaattaaaatgggaagcggcggatttgctgtatcatttgctcgttcttctgcgtgagcagtcgcttcctttggatgacgtgcttgacgtccttgcgaaacgccattctgcatctgagtaaaacaaacctcgcggagagacccgtgaggtttttattctgtcaaacttaaacattcaataaaatattccttatttccgcaaccgtaggcagatgaatttgataatattgactaatagagtttattttggtttttatcaaaaatatacgttttgttcatattccgttcatgcacatccgttatagtataaacagtgatataggaggaaaacatatgccgaataaacaaccaaaaccaaaagggaaattcagctcattcttttcattagtcaaaaaaacaaaaccatcatacggtatgctggccttcgcgctgtctctcagtattgtgacaacgctcgtcagcctgctgattccgctgttgacaaagcagctcgttgacggcttttccgtgtcgtcgctgtcaggcgtgcaaatcggaatcatcgcagccgtgttcatcgtacaggccgcattaagcgcctacgccacctacgccctgaactacagcggccagaaaatcatctcgggactgcgtgatttgttgtggcagaaattaattaaactgcccgtctcttattttgacaaaaacgccacgggagaaacgatcagccgtgtcaccaatgacacaatggtggtaaaagagctgatcacaaacaatatcagcggatttattaccggaatcatttccgttatcgggtcactgacgatcttatttttcatgaactggaagctcacattgctcgtgctgatcgtcgtgccgctggctgcggtgattttagtgccgatcggccggaaaatgtttaaaatttctcgggaaacacaggatgaaacggcgagattcaccggattattaaaccacatcctcccggaaatcaggcttgtaaaagcgtcaaacgctgaagaagcggaatacggacgcggaaaagcaggcatcatggcgctctttaaactcgggctgcgtgaagcgaaggtgcagtcgctcgtaggcccgcttattacacttgtattaatggcggcgctggtcgctgtcatcgggtacggcgggatgcaggtgtcatccggtgaattgacagccggcgcactcgttgcctttatcctgtatttgtttcagatcattatgccgatgggccagatcacttcatttttcacacagcttcaaaaatccgtcggcgcaacggaacggatgattcatattcttgcagaaaaagaagaagatatccaaatcggaaaagccattgaaaacgcggatcagccgattaagctcgaacaagtctcattcggctacaaaacagatcaaaccatcttaaaagacattacggctacgattgaggccggcaaagtcaccgcgatcgtcggaccgagcggcggcgggaaaacaacgttatttaagctgcttgaacgattctacaacccgactgcgggcagcatcctgctcggaaatgaaccgattgatgcgtattcccttgagtcatggcgggagcatatcggctacgtgtcgcaagaaagcccgttaatgtcaggcaccatccgcgacaatatctgctacggattaaaacgcgaggtgactgatgaggaactgaggcaagcggctgacatggcctacgccctgcaatttattgaagacttaccgaagaaatttgaaacagaggtcggtgagcggggaattatgctgtcaggcggacagcgccagcgcatcgccattgccagagcgctccttcgcaacccgagcattctgatgcttgatgaagcgacatcaagtctggacagccaatctgaaaaatgggtgcagcaggcgctggaagttctaatggaaggccgcaccacgatcgtgatcgcccatcgtttatccacggttgtggatgcagatcagcttctctttgtcgaacagggtgaaatcaccggacggggcacacaccatgaattaatggcatcccattcgctgtaccgcgattttgcggagcagcagctgaagctgaatgccgacttagaaaacaaagctgtgtaaagcaagactttatgaatagaaagcagctgaaaaagctgctttttattttgcagccggagttctcttcatagaaagcgggggttaaattatgaaaaaacgcacaaagattttttattggcacgcggccttactgctcgtattcatgactgccgggtgtacggacggtaacgatgaagagccgagccattcttcaagtccggccggagaaagcagcggcatcaacaaggctgaaacagcatcagcggcagaaaaaaaagaaccagtaaacaaagattcacatcacatctctgcggacaaaagcctgtcggcagattattctcctctgcaaattgaatatgcccgcatctggctgcagcttggggaaaatcagcagatagatgaattgaacgttcgccgcattccggccggagcactcgtcaaccctgacgatcatacgagcgcccgctatcccgaagatgttacgcagttagcaggctcccggttagtcgatgggtcagtcacttacagcagcaatggtgacggcaccattcagatatacaatgttcctttgcgctgggagtctcgtgaagatactgatcaaggcgtaatgaaagaagtgacggaggaaatgatccgccatacaaaaaaagtgtctgtcgatacaggagacaatgaaaaaataagatggttaatagacatcatgtcgattcattaaaagaagacaggcaaaaaagcagaaggagggatttttatggctgtcatattggttgcggatgacgaccgccatatccgtgagcttgtccgactcatgatggagcagagcggctttgacgtcgcagaagcggaagacggggaagcggcggtgcggctgatcgaatcagcacctattgatctcatcatactggatgtgatgatgccgaaaatggacgggtttgaagtcagtgaagccgtccgcagctttacggacattccgattttgatgctgacggcaaaaggcgaaacgctggacaaagtgcaaggttttacttccggagcggatgattatctcgtcaaaccgtttgagccgcttgaactggaagcaagggtcaaagcattgctgaaacggtaccggatcaccgctgaaaaactgctgaccatcggaaatgtcacattagataagcaatcccgcaccgtaacgcgcggcggcggagcgggattgacgctgccccggcgtgaatttgagcttttatttaagctcgccggttatccgaataagacgttttcaagagaacaattaatagaagatatttggggctttgattatgaaggtgacgagcggacggttgatgtgcatgttaaaaggctgagggaacggtttccggaaaaggactatccgtttgctatccatacggtgcgggggctcgggtatcggtttgtggtgacagaatgaaacggatcttcagaacggctggaaaaatcatcatccttctcaccgtcaccgcattcttatggctggcggctcatctgatcgttcagggattcggtctcatatggccgattttgcttgtgccgtacgccgagcagattctgacgctctggcttgttttcggcctgctgtttataacgatgtttatcttttcaaagtcagcacgtgaaagacatcatgcgatctgggattcactgaccgccacgatcaagcaaatgtcgagcggcaacttcacagcggccgcctccaggaaaatggagaagattgaacgggaccaccccgtgacgaaattggctgatgaactgtcgacactcgccgcggaactgagtgaaatggaaaagctgaaacaagaatttatttcgaacgtttcccatgaaatccaaaccccgcttacttcattaaagggctacgcgcacctcctgaaaaaaccggatttatcatatgaggagcgggggcgctatttacacatcatcgagacagaaacagaacgattatcaaaaatcagtgaaaatctgctgaagctcactgcgcttgaacgccaaaccgaaccgatacaaaaaaaaccgttccgcattgacaaacagctgcggcgcaccatattgacctgtgagcctgaatggtccgccaaacagattgagtttctcattgatttacaggagtcgtatgtgtacggagatgaagcgctgctcagccaagtatggatgaatctgattcacaatgccgtgaaatttaccggtgaaggcggccgcatttccgttaaaattgttgatctgccgggagcggcggctgtcgaaatcgccgacgacggaatcggaatggagcctgaacaggcggagcgggtatttgaacggttttataaagcggataaggcgagaaacgcagggggaagcgggctcggcctgtccatcgcccaaaaaatcgcagagctgcacggcggttcgatagaggttgagagcaagcgcggcgaaggaacccttttccgcgtcattcttccagccgagcctcgtgaaaaaaacagctaaaatctggtcgaaccagccagtaaaaaacgaagccgatcctgtcttttgaactattgaggcgaaaccgttttatggtatactactgacggtaatacgtataaaacggaggatatttgtgggaaaacacacttctgaacagaaaaagcacgcgcaaattgtccagctgcttcaggatggacaatatttttttcataaaggcttaaaagcatataaagagcggaatttaaaacgggccagcaaactgattcagcgggccgtccatctcgagccgaatgattccgaaatgctgtcacggctggccgtcatttattctgaaatgggccactaccagcagtcaaatgagctgttcgactttattttggtgaacctgaaagaagaaatgcccgagtgtcattattttaaagcgaataatttcgcgcatttggggctctttcaggaagcatacaaagaagcggaggcttattcagatgccgatccggacggggaattcagcgaagagattgaaaatctgatggagcttttggatttcggcgaagcgggtgaaaacgaatcgctctatgaccaggatgagctgctgatcaggcaggaccgggcaaaaacgcttcttgagagcggccagcttcatgaagcggttgtcatgcttgaagagattacggccgattaccccgagctttggtctgcatacaacaacctggcgctcgcttacttttactcaggcaatgttacaaaagcgaaacagacggtattcgaagtgcttgagaaaaatgaaggcaatctccatgccctgtgcaacctccttgtattctgctattacgagagggaagatgaaaaagtcggagaattgagcggaaaactcgccaacgtgtatccgattttattcgaacagcgctataagctgggggcgacgcttgcgcttgtcggcagacatgatctcggttataaatggctccgttctctttacaaaagcgggttcgaaggcgacgaaacgttttattactggcttgccgcctcagcctacgggacaggccgcacagaatttgcggaaaccatttggaaaaaggccgaagccgaatttcccgaatcagaccggcccgcgccttgggcggagcggcaggaaccgctgcctgcttcacttgaacagcggcttgccgcctattatatcagcagcgctgaaggagagcggaaccagcttgaaaaagttctgacggcaaaacgcgccgtttcaccgtttgaacaagatttcgtcagactgctgctttccggtgaaaaaggcgcttcaggcgtctccggtgacgcgctgttcacgtatcggacggtcaagcttctggagaaagcggaagccgacagtttaaaaactgacgtcatgagctgctgggtttttcacgtcattcagcacatccgcgccgccgctgccgtacagaatgagcgggcatgggccgcagccatcgcatacgtatggaaagaagcaaacggcgaaaaaacgacgaaaaaagaaacggccgccgtttacggtataaccccggcaaccctttcgaaatacatcagacaaatagatgatatattagaataaaaccgattctttctatataaagagtcggttcttttttttattataaaggggcaaaacagaactttaccgccgaaaaaagaggtattcatacgtatttttttgctttttgaatcgaaatcaggccgtaatcaccgtttattttgcaaaatatgagatttgcaatcacattgaaatataactgtaataaaaattgtcgaaacatgatggtataatgagtctcgtacataagagattagtttattttacatgtgctgtataatctataccaattaaccagattcaaagaatcgtacataaaaatcatcagcctcacgggcatgtgagggagcgtaactttgatgttcataatagaattccaaatgagaacaggtttaaagtaaaagggaggaaagaaaaagtgaaaaagagtttattaacacttggtttggcttccgtcatcgggacaagcagttttttgatcccgtttacaaaaactgcatcggcggaaacattagacagcaaaaaagcgaaaattgaaagcaagcaatctgaggtggcttcaagccttgaagcaaaagaaagagaattgtccaagcttcaggacaagcaggctaagattgaaaaagaactgaaagacattaacgctaaagcgttggatacaagcaataaaatcgaagataaaaaagctgaaaacgaaaaaacgaaaaagcagatcgctgatttgaaaaaagaaatcaaagaaacagaagcgcgtattgaaaaacgcaatgaaatcctgaaaaaacgcgttcgttctttacaggaaaacggcggttctcaaggatacatagatgtacttttaggggcgacaagcttcggagacttcatttcccgtgcgactgcagtatcttctatcgttgatgcggataaagacctgatcaaacagcaggagcaggataaagcgaaactcgaagacgcagaggctgaacttaacgtgaagctgaaaaaagttcaagatgatcttgcgaaactcgagtctatgcaaaaagacctgaacaaacagcttgatcagaaagacaagcttttcgacgaagcgaaaaacggtcagaaaaaagcggcttccgctatctctgatctgaaaaaagaagcgtcacagcttgcaaaccaaaaagctgacactgaaaaagagcagaagcgcattaaagctgagcaggctgcagcggctgccctgatcaaaaaacaggaagaagcgcaaaaagcttctgaagaccaaaaccaaaaagatgacagccagccggcaccggcggttaaaactgtgaaaaaagcggctgtttcaacatcatctgattcatctgacagctcaagcaaaccgaagagcacttcaggcggatcatctcataacagcggcggttcagatgattctgacggcggatctgttatttcaaattcaggcggtattgaaggcgcgatcagcgtaggatcaagccttgtgggtcaatctccgtataaattcggcggcggacgcactcaatccgatattgacaaccgtatctttgactgctcttcattcgtacgctgggcttatgctaacgcaggcgttaatctcggacctgcaagcggcacaaacacagatacattaatcggaagaggtaaagcagtaagcgcgtctgacatgaaacgcggagacttagtattcttcaacacgtataaaacaaacggccacgtcggcatctacttaggtaacggaacgttcctgaacgataatacatcacacggtgtatccattgattctatgagcaacccttactggaagaaagcattcaacggcaatgtaagacgtgtcgtgcaataatgaataagacaagggccttctatcccggaaggctctttctttatttgtatacccgctcaggagctccctaatcacggtttctcagaaaaatgagcaaaaaaatagcgaattgccctcagatttaataggatatgggtaaggaatacgattgatggggattcttagtcatatagggtgcgccccatttcgaaaaggagtgaatcatggtgtcagaagaaaaaatttatgatgtgatcattatcggcgcgggtccggcggggatgaccgctgctgtttacacatcacgagcgaacttatccacattaatgatcgaaagaggaattccgggcggccagatggccaacacggaggatgttgaaaactatccgggttttgaaagcattctcggccctgaactttctaataaaatgtttgaacatgcgaaaaaattcggtgcggaatatgcgtacggcgatattaaagaaatcgtggacggtaaagaatataaaacggtcaaagccggttcaaaagaatataaagcgcgcgccatcgtcatttctgccggagcggaatacaaaaagatcggcgttcccggcgaaaaagaactgggcggccgcggcgtatcgtactgcgcggtttgtgacggcgcgttctttaaaaataaagagcttgtcgttgtcggcggcggagactccgccgttgaagaaggcgtctatctgacacgcttcgcttcaaaagtcaccatcgttcacagacgtgacaaattgcgtgcgcaaagcattcttcaggcgcgtgcctttgacaatgagaaaattgacttcaaatggaacaaaaccgtaaaagaaatccatgaggaaaacggaaaagtcggcagacttactcttgtggataccgtgacgggagaagaggaagaattcaaagctgacggcgtctttatttatatcggtatgcttccgctttctaaaccgttcgaaaacttgggcatcacaaatgaagaaggctacattgaaacaaatgcccaaatggagacaaaagtcccaggcattttcgccgcgggagacatccgtgaaaaaacgctccgccagatcgtaacggcgacaggcgacggaagtattgcggctcaaagcgttcagcattatgtggaagagcttgaggaaacgctcaaaaccgttaaataatcactgtaatgttcagtttttgaatcgttactgtgttttaattacgctgtaacacgggtgaaatactgatgttttaagatgaatgtagtaattgaccccctttttaatgaatacactttggcacggattccagtatccgtgccctttttttgcgattttttgttttctgtcaaataaaagaaaaggatgtcggtgtctctgcattgtgagagacatgccgaaacggtataatgaagagacgatgatttgttgagaaggttaggtgacgtacttgtgcaaagagtgacaaattgtgtgctgcagacagatgatcaggttctccttctccaaaagccgagacggggctggtgggtcgcgcccggcgggaagatggaaagcggcgaatccgtcagagattccgtcatcagagagtacagagaagagacgggcatttatatactaaatccgcagttaaaaggcgtgtttacctttattattaaggaacaggaacaaatcgtgtcagagtggatgatgtttactttcgtcgccgactcctacacggggcggaatgtcgctgaatcagaggaaggcgttctgaagtggcatgacgtaaaagatatccacagccttccgatggcccccggagacgggcatatccttgattttatgatcaagggccaagggcttttgcacggcacctttacgtatacgccggacttcgagctgctcagctatcgtttagatccgcagcttatcaaataaaagaaagaccgcaggggggagaaagatgagtatgaatgaaaaccatgatattcagctcgtcatcattacgggaatgtctggagcggggaaaaccgtcgccattcaaagctttgaggatctcggctatttttgcgtcgacaatctgccgccttccttgctgccgaaatttttggagctgatgaaagaatcaagttcaaaaatgagcaaggtcgcgcttgtcatggatctgcggggacgtgaattttttgacaggctgattgaggcgctggatgaaatggcggaaaatccgtggattacaccgcgcattctctttttagacgctaaggattccatccttgtgacgagatacaaagaaacgaggcgttctcacccgctggccgctaccgggcttcctcttgaaggaatcgcgctggaacgccagctgcttgaagaattgaaagggcgctctcagctgatctatgacacatcggatatgaaaccgcgtgatctgcgtgaaaaaatcgtggcgcatttcgccacgaaccaaggtgaaacatttacagtgaacgtgatgtcattcggtttcaaatacgggcttccgatagatgccgacctcgtgtttgatgtaaggtttctgccgaatccattctacattgaaagcatgaggccgcttacggggaaagatgaggaagtgtcatcctatgtgatgaagtggaacgaaacacaaaagtttattgaaaagcttgttgatctgctcggctttatgcttccgtcttataagcgggaaggtaaaagccagcttgtcatcgcgatcggctgtacgggcggccagcaccgctccgtcacgctcgctgagtatttggctgactattttaaaaaagatttctatactcatgtcactcaccgggacattgaaaagagaagccggaaatgaataagaagccgaaaatcgcaatcttcggcggcggaacgggtctgtccgtgctgcttcgggggttaaagcataagcccgttgatattacggcgattgtgacagttgctgatgacggcggaagttcaggccgtctgcgggatgaacttcaaattccgccgccgggtgacatccgtaacgtactggctgctttgtcagatgttgagccgctcgttgaaaatctgtttcagcaccgtttcaacaaaggaagcgacttaaccggacattcgctcggcaatttgattttggcagcgatgacaaatataaccggtgatttctttcacgctgtcaccgaaatgagcaaggtgctgaatgtccgcggcagagtgctgccggctgccaacaccagtgtcgttcttcacgctgaaatggaggacgggcaggtcgtctccggagaatcgacaatcccttcttacggccagcgaattaaacgggtgtttcttacgcctgaaaaaattgatccgctgccggaaacgattgacgtcatccgtcaggccgatttaatcattatcggtccgggaagcctgtacacaagcattcttccgaatctgctcgtgccgaaaatcggagaggaagtcgtcaaggccgcggccaaaaaagtatatatatgcaacgtcatgacacagcccggcgagacgcttcaatacagcgcggccgaccatgtcaaggcgctgaacgatcatatggagcagccgtttatcgacacgatcttaatcaacaatgaggagatccctgacgaaatcaaaagcaaatatgcgaaagagctggcccggcccgtcgacttcaatgttgaaaagctgaaatccatggggcttgaggtcatcagggatcagattatcacgtataaaaatggcgtaatccgtcacgatacacataaagtggcttctcttcttgtcgatttattaagggactagaggccttttgaaatgaggtggctaatatgtcatttgcatcggaaacaaaaaaagaactgacgaatctggaagtgaaggactgctgcgccaaggcggagctgtccgcgctgattcggatgaacggttccctgtcattttcaaaccgccatctcgtgcttgacgttcaaaccgaaaatgcggcgattgcccgccgcatttatacattgctgaagaaacaatatgatgtatcggtcgaactgttagtcagaaaaaaaatgcggctgaaaaaaaataatgtttatattgtgcgcttttctgaaaatgcaaagctgattttagaggaattgaaaatcctcggggagaactttgtatttgaacggaatatttctgaggaactggtggcgaaacggtgctgcaaacgttcttatatgagaggggcgtttttggcgggaggatctgtgaataatcccgaaacatcgtcgtaccacttggaaatcttctcgctttataaggaacataacgattcattatgcgccctgctgaatgattttcatctgaacagcaaaacgcttgaacggaaaaaaggctatattacgtatttaaaagaggcggaaaaaatcactgaatttctgaatgtcatcggcgctcacaattcactgctgcgctttgaagatgtgcggattgtcagagatatgagaaactcagtgaaccgcctcgtcaattgtgaaacagcaaacttaaacaaaaccatcggggcttctctcagacaggtggaaaatattaaatacattgatgaacggatcggtcttgaagcgctgccggaaaagcttcgcgaaattgcgcagctgcggattgattatcaggaggtcacgctgaaagaactgggggaaatggttgcaagcgggaaaatcagcaaatccggcatcaatcacaggctgagaaagctcgatgaaatcgcagaacagctgcgtacaggacaaagcatcactttgaaataaccgtacagaaaaggggagatcttatggttcaggggaaagtggaagtgcgtttaaagacgggattgcaggcgcgccccgctgcattgtttgtacaggaggcaaatcgttttgcatcagatgtgtttcttgagaaaaacggcaagaaagtgaatgccaaaagcattatgggattaatgagtctggcggtcagtacggggacggaagtcactctgatcgctgaaggcgacgatgaaaaggaagcgctggaaaagttgtccgcttatgtgcaggaagaagtgtaaacactttgtaagggggacggaacgatgaatgagtttctgaaagattgttatcaaacgataggctgggaaaaggattccctcgatttcagcaacctgccggagtttttaaaggcgctcgcgtatcggtttccgtttgaaaaccgcgccgttttgtccaaaaaagaatatgacgtcacgaaagaaggactgtggcggcacatggtgaaggaacctcacggcggtctttgttatgacttgaacggactgctttatttcatcctgaaagatgccggatttgatgtcaaattgatccgcggaacggtctggaaaaacggctgggcgctgcccggcacacatgcggccgtacttctttccgccgggggaaatgagtacatcgctgatgcaggcttcggcctcaatctcgccatgcagcctgtgccgatgtcgggagacgagacggtatcagcggccggagcgttccgcgtgaggatagaagagacggaattcgggacatacgtgcttgaaatgaacaaaggggacggctggcagacaggctacgcattttcgcttgaagaaatcgatgaaaaggacctcaagtctatgaaacaaacaatctttgaacatgaacgttctcctttcaacaaacgcctgcttgcttctaagcggacaccggaagggcacatggttctgtctgaacgcaatataacaataaaaaaacacgatggcacggcggaaaacagcagaatagaccgctcagagtttgaagaaaaatttactgctcattttatatgaagcttgcagattctctgcaaaaaaacggcctccgcagggaagccgttttttgtatgtgtttatctcatttttgtaaaggtttgatagtggtctgtcgtcttataaatcagccagtcgcttgagtaaagaatccggtctgaatttctgaagcctgatgtatagttaatatccgcttcacgccacgtccgtccgctttttacagggagtttgccttccctgtttgagaagatgtccccgccgatgcttttccccggggcgacgtccgccagattcccctttgatgccacccagccgagggcctgtgcttctgattttgtaatgtagttatcaggaagcttgtgataggtctgaagataatccgcaaccccgtcaaacgtgttgataacctgtgcttcagtgtgcgccttgtgagaagatgtatccgtcttggcagccgttgaaaacagcatccccgccgcggagaacagcaccagcaaacaaacggaaatccacgataatcgttttttcaaagcaatacctcccatttttatcatgtgaagctgattccttttcattgtatcagcatcaagagaaaggaatagaaagaattttaaaatagtacttttgatctagcgaaaaataaaccccggctgaaacggccgggatttttcatctcattgaaattccttcgtgaggtttttcggtgtttttccgtatacggcgtcaatcatgttctgtgcggcttgcttgaacatattcaagcggatttttgcggttgctgacccgatatgcggaagcaatgtgacgttttccagctgcaggagcggattatcttcggcgatcggctctttttcaaacacatctaaaccggcgccttttatccagccctcttgcaatgcgcggatgagcgctttctcatcaactgtctttccccgggaaatattgacgaaacatgccgtatctttcatcaatttaaattccctctctcccatcatatgatatgtttcgtcagtaagcggggtaattaaaagcacaaagtctgatgttttcagcagtgtatctaagtcggtatatgtaaccccgagttccttctcggcatccggttttctgctgcggttataatacagcacgtccatatcgaagccgaattttgcccgtttggcagcttgttcaccgattctgcccatgccgataattcctaatgtctgatggtggacatccataccgaaaagagattcctcctcaacggttccccatttgccggcgcggacgaatcgatccaattcggcaacccgtctggcggaagacagaattaatgaaaaagccagatcagcgacagtgtcatctaaggtgtacggtgtatgcgtgccgacaaccccgcgccttttcatttctttaatattaaaattatcatagccgactgaattattgctgacgaccttcagcttcggcgcgtgatccagcaaatcactgtcaatcgccgttccggatgtcagcagcccttcagcatctttcattttttcgtacagtttctcttttggaatggtatcttctttccagatgtcatagcggcaatgctcgtctatcatttgttcgacttcgggcggtatcggtttcgcgatgaatacatagggtttcaacgggcttctcctcctttgtctttcttctctattttattatataagagaagcggtaacgtgagaaataatcaaacgcattacgataaatttctggttcttttgaacttaaaatgaaagaaaaaggaatgtacatgcttgatttctccaaacaataacagaatccgcctatatttctgaaggcaaaatgagcggaaccgctgttttcaaaagctttataggttggtgtaaagataaattttattatttttgaaagatataaatgaatataatctgaatttacagtcaaattatcgtgtctttttttgaaagcgcttttgaggcctttttctgtgctataattccttactgtaagctgggtaagaaggcttgcaatacaatcggatgggagatgaatagaaaaatggtttctttatcaagcattttggagcacaaccagcagtttgtccaagaaaggaaatatgaaccttaccaaacgacaaaattcccgaaaaaaaagcttgtcatcgtatcctgtatggatacaaggctgacggagcttctgccgcaggcgatgggactcagaaacggcgatgccaaaatcataaaaaacgcgggagccattgtttctcacccatttggaagtgtcatgcggagcattttggttgccgtttatgaactgcaggcagaggaagtctgcatcataggtcaccgcgagtgcggaatgtcgggattaaatgcggcttccatattaaataaagcaaaagagcgcggggtggaggacaaatgtctcagccttctgcagcatgcgggagtcgatttggaaacatggctgaccggttttcacagcgtcgaagaaagcgtggcccacagcgtgaatatggtcaggcatcatccgctcttgcctgaagaggtgccggtgcacgggctggtgatcgatccgggaacggggacgctggatgtagtcgttgacggttatgaaacagtcaaaggaggatgcagctgacgatgcaatttaccggcagatatcagggatacaatttgcagaaatttcagaaagacctaatcgcgggaattgtggtcggaattgtagcgattccactggggatggcctttgccatcgcctcgggggtcggtccggaatacgggctttacaccgttattgtggccggaattctgatttcgctgttgggcggctctaaatatcagatcggcgggcctacaggggcgtttgttcccattttatttgccattgtgatgcagtatggttttgagaatttacttgtagccggttttatggcaggcgtcatgctcgtcctgtttggcgtatttaagctcggaaagattatgaaattcgtgccgaagccggtgatcgtcggatttacggccgggatcgcggtgctgattttctcggagcagattgcccattttctcggtctgcgcgatatccaaaagcatgaaagctttatcctcaacattgcggaaataggcaagaagatcggaacctttaatttgtacagcatcctcatcgcgggaattgctttggccattttgctgttatcagccaggctgatgccgaagattcccggcgcgcttgtggccctgcttgtctctacagccgctgcggtcgtgttttttcctgacaaaatggcgacaatcggttctgcttacggagaaattccgcggcagcttccggctttccagcttccggatttctcaattgataacatggtgatgatgtttccctcggctctgatcattgcgcttctcggcggacttgaatccatattatcggcgatggtcgcggacaatatgaaaggatcacggcatgacagcaatagggagcttgtcgggcagggcatcgccaatatggcagcgccgcttttcggcggcataccggcaacgggagcgattgcgcggaccgcaacaaatattaaaaacggcgcagtttctccgatttccggtgttgtccacggagtcaccgtcctcctcgtcctgctcgtcttcgccccgcttgccgttcacgtaccgctggcaagcatggcgccggtattgatggttgtggcttggaacatgagtgagcggagggaagtcgccaatatgatgcggctgaaaaacactgattcattcgtactggcggcaacctttttgctgacggttctgtttgatttaattatcggcgtttctgccggtcttgtgctcgcttttgttttctttatcagaaaaatgagcgaatcaacaagcattaaaacaccgcatgccgcggtcaaatcggttaaaaatgattcgtccgtcagcacatattccattgaagggccgctgtttttcggttcaattgattcactggaatcatcgctgctggagaggcttcaggaaaagccgaagacgcttattctgctgatgaataatgtgcattacatggatacctccgcagaagcggtgctggggaatgtgatgaaccggatcaaacggcataacgggagattgatgatcgtcggattgcaatcacagccgagagagctgatccggaagacggggctgtttcataaaatcgggaaacagcatttctttgagcatcaggacgagataacgggataaattcagatacggcctgtccatgaaaaagcggacgggccgtgtttttattcggtttcaaagcgcttgatcagtttttcctgatgggctttcatcgcatcttctaacgtgattccgtacttatcggcaaggatagccagatttccgaggacgtcacccatttcttcaatcagctcctgcctgcgttcagcctgggttgcgtccttttcatccggccggtctctgccgatttcatatgctcttaccgcccgggcgagctcacccgcttcttccattaaaaagccgattctgataaatggcccgtacgccgtccatcctcgtttttcgtaaaaatctttcgtccattgttctgcttcagccatctgcatgtgaaacactccttatgtcctgtatgattcttattgatattatcatatagagatgggacaatatatagtgtattttgatttattgatgtacatatatagatgcggagatgaaaaaatgaaaaccatttgtgtatttgcggggtcaaacccgggggtaaatgaagagtacaaacgcaaagcggccgaactgggtgaatatatggcggagcagggaatcggccttgtttacggcggttcacgggtcggtctgatgggaaccgtcgctgatgcgttaatggcaggcggcggaaaagctgtcggcgtcatgccgagcgggcttttcagcggagagattgttcatcagaatctgacggagctgattgaagtcagcggcatgcatgagcggaaagcgaaaatgagtgaacttgccgacgggtacattgccatgcccggcggtttcggaacatatgaagagttatttgaagtgctgtgctgggcgcaaatcggcattcatcaaaaaccgatcggactgtacaatgtgaacgggtattttgagccgatgatgaagatggtcaagtacagcatccaggaaggattttcgaatgagtctcatttaaagctgatacatagttcctcccggccggatgagctgattgagcagatgaatcggtatacatacccgattttagataagaaatggcgtgaattgtaaggcagcggtctgaaatatgtttcggcggctgcatctaattcattctgacggaaagttcttttctccttctcatgcgtaccacgcctttcttcgtaataagagatatgtctgagaataagaggcgaatgagactgctgttggggttgaaagaagaacatccatttcctcagaggagatggatgttttgcggtttccagactgtatgcgtttacaacttttgttgcacgaaagtttcttccgatatgaaatcatcctgctgcatcttttgtttttttgaaccgattccaaatataccgactgtcagtgcacaaagaaaccagcagcctgtaaagaataagaaaacacttaaaaatccgtagcctgaatacaggaaactgacgacaaagggaccggctacatttgcaaggcgtcctacgccgtaagtgaggccatttccagatgccctggcttcaaccggatataattccggcgtataagcatatgcgatcgaactgaaagtacgctcaaacatatgcatgagaaatccgcatacgataatgaccatcggcaaaggattgatgccgtaaaagaatccaagcgccataataattaacgataaaacagaaatggcccactttcgatccacacggtcagagatttgcgccgcaatgagagcgcccagcggggcaccgatcgttcccagagtgacgtatacgatagactcatccattgatacgccttctttcaccagaagggtgggaacccacgtgccaaagccttgaattgcaatggtggaagctgcccacatcgtcattaaaacaaaagttcttcctgctaaaggcttttgaaacagcgtccgatatggaacggattttacagcggtttgtctgctttgcagagccggagctggttcaggcagttcacccttttcattttctgcttttgcctccagttcaagcagaatgcggtgtgcttgttcgctttttcctttcgtgtccagccatttcggtgattcttccagttttctggcgatcagcggaaaaaaaataccgaccgcgccgaatagaaagacaaaccgccagccgtaagaggcggacggcacgaccaatttagccacccagccggccgcaggaattccgcatatgccgattgtaatacagattgcctggtatttgcctttagttgcggatgggaaaaattcgctgatatacgtactcgccacaatcgttgtggcgccgatacctaaactcgtaaaaaatctaaaaacaccgagtatttctgggttccaagccagagaagagaggagggagaaggaagagaaaaaggtgacaaccagaattaaaccttttttccttccgaaacggtctgaaaaccatcctccggcagaggcgccgataaacattccgaaataggagacagatgtaataaaagcgatagtatgagtggatatgttccattcctttaaaagtgaaggcgccgcatatgaaaacgtatttaaatcgataaaatcaaaaaagtaagcgaatgaaaggataacgagcactgcttgatgggcccttgaaaaaggcagtctgtttaatcgattagacgcatttacattgatcatctcgtattcctccgtttatctttgacttgtctgaagacggtattaaccaatgtgattgagcgtattcatgctgtaactttgtttagtaaacacatagccttcagagatttttcttgctgtgcgtactactttaatcgttgttccatccggatcaacatctgcctcggtttttaaaataccgcttggatgccccaatcggatcgttctcccggagaatgaaaattcagataatattgtatcttgcaatagcatgccggcagtcgtacataccgcccctgtaatggctaaagcttgatgcggtttttgcatggacatcatacgaatgacaagatccatctcttctgcgtgtctctttatcccttttgtatcgatataatccgctggagatgagattaatgtcagttttggtacggccggtgattttgcagcagcctcatgtctcggagcgaatctgcatttctcggctgcaatcgatcggatcatttcgagcttttccaatatatccggggtatattcatccggaagttctaagccggtaagccccgtgtcctctgcttttacaaagacaagcggattggcgtaatcaataatcgataccgagatatttccatacggggtatcgagaacatcaataggctgaccggtgggaaacagcttaccggtcaccgctccttcagcctggtgaaatgaaagataaataggagaagctgtacctggaacccccggaatagagcagtccccctggtaatgaaatgttccatttctgacttcgacttctgctgcgatcactttttgagtgtttgtatttaaaattctgacttttgtaaccggctcttcagcttgaacgagccctttctcaatagcataagggcctacggcagaagagatatttccgcaattgcctttgaagtcggtaaatttgtcagtcagactgacctgagcaaacgtatactcaacatctgcatcctttctggcggatttcttaataatggctgccttgcttgtgagagaatggccgccgccgagaccgtcaatttgtctctcgtcagggctccccataatgtctaaaagaaaatcgctccataggtttgtatcgtctggcatgtctttttgaagaataaaaacgcctttgctggtgccgcctctcataacggttacaggaactttttccatgctgtctcatccttacatcattttgtgtggataaaaaggtaccggtccctttggaagatatcgtatgataaataaggattataagtaaaacatataatttttataaagttaaataaaaaacttttataataggagaaaattttatagcagaaaaatattttgggggatttcatatggatgaaaaggattggattgtgctcattacattattcgaagaaaaaaatatgacgaaggcggcagagcgattatatatgacacagccggcgttaagttatcggctcaaaaacctggaagcacaattcggagtgcgccttttttataaaagaaaaaaagggatggagttcacttcagaaggtgaacatctggttgattattcgaaagagatgctgcaggagttcagaagagtgaaggatgatatgctcaatatgagccatgaagtcagcggggttctcagattaggagtctcaagcaattttgctcagtataagctcccggcgattctaaaacggttttctgatcagtatccgtctgttcaattccacgtcaatacgggatggagtgcgaaggtgatggatctgcttcatcattcgggggtacaccttgggattatgagggggaattatgattggcaaggagaaaaacaactgctgaatgaagagaggctgtaccttatttcaaaaactgaaatcaacagtgaggaccttcccaaattgccgatgatttattatcaaactgatgcttctttgaaaagtttgattcaaaaatggtggaataaccaatttactgaaccgcctttcattgcaatggaggtagacaggcaggaaacctgtaaagagatggtgaaaaacggcctcggttattctgttgtgccggaaatctgtcttcagccttctgatgaattatacacattggcgctatcctataaaaataatgaacctgtgatacgcgatacttggctcatgtatgattcttcagcgttagaattatctgtcgtcaaagcattcattacttttttgaatgggaataaagcataaaaaaacctgcaagagacatcatctcttgcaggttttttgggcattacttctggtcttccgtattgcgtgtcagcactttatcgattaagccgtattctaaagcttcatcagctgatttgaagttgtcgcggtctgtatcgcgctcaatgacttcaagcggctggccggtacgttcagcaagcactttgtttaatttgtcgcgaagcaagagaatgcgttttgcggcgatttcaatttctgtcgcctgtccttgcgctccgccaagcggctggtgaatcataacttcactgttaggaagcgcgtaacgtttgcctttttctccggctgcaagtaaaaatgctcccatagaagcggccataccgatgcagatcgtggatactttcggtttaatgaactgcattgtatcatagattgccataccggcagtgattgatccgccagggctgttaatgtaaatggaaatatctttttcagggtcttccgcttcaaggaataaaagctgtgacacgatggagttcgcaacgttgtcatcaatcgcagatccaagcatgataatacggtccttcaaaagacgggagtaaatgtcataagctctttctccgcggttcgtttgttcaatgactgtaggtattaaattcataatgctcctccttcaccttttaggtaagtatgtatttacatgatacatttttggtcaataaaggtcaaacaaaacgctgaccaaaatgccaaccttttcttctaacaccatttttcccataaaacaaaaagttcaaacagcaaagtgaaaatgaggatgatcagcgccggagccttgagaaaatgatatggccggagcgctcaaaatagaccgcagtcgcgtcggtacatacggctgaacggtctgactacgttgtccgtccttccaaaagccgtaccggcaaatacgtttccagcggcaaatcatcaaattcgccttcaatttcttttgctaaaatctcgatggctgttttggaaatcaattcgatcggctgctggatggttgtcaagtccggcagaaccgattgaacggtttcagtgccgtcataaccgatcacttttaattgattcgggaggtctttcccccgttttttagcctcggtcatcacggcagccgccatgatatcatcgctggcaaaaattccgtcggtgtcaggctgttcatcgaataatgttgaaataatatcatggtaatgctgataaaagggtacttcatatgtaataggcttccgtccgtgttcatgcatgacgtcttcgtatgcttttcttctgaggtttgccggtgtttcgagttcaatcgggccgttgagatggacgatgtgccggcaccctttttcaatcagcagttcagccgccttttttccgccgtcatagttgtctgagccgacgacgggaatcgtgtccgataagtaatgatcaatggcgacaatcggcagattctgcttgtgataattgagaattccccggttataagtcacggcgatcacgccgtccacttggtttcttatcagcatctccaaatatttttcttccttatcctttcgatgtaaactgttgcaaagcagcagtttgtagcccatggacgtacaaatgctttcaatatgaaaggcgagttcgccgaaaaacgggttgctggagtttgggatgataagtcctattaaattggttcgttttcggaataaagagcgggccagatcgtttggaaagtaattgatttcttccatcgccttgtacactttttcttttgttttttcgctgatatagccgcggttatttaatacccgcgaaacggttgtagatgaaactcccgctattttcgcaacatcatgaatgttaggcttcattcccgtgccctcctgcatactgaaatggcttacaatttccgtcacgcacttattttagagaatcaggctgacatgtgcaaggacattccatgtttctgttttcatataaagagggtgcgttttgtttgattggaataatcagaaaatcatatgtcaaccgattgacatatgaaaccggttgacatacaattctttttgaaagcgctttatttacggagtgaagggaagtgacgggtatggagagatggctggcggcaataaagtgaaagaatcaagcagcggcggaaagtaagcgcttactcggagctcgcatgtatgtgatgaatatgaagaaggaagtatgcggctcaaaatgactattaaaaggtcctattaaaggagcggtgcaaatgaaaagctcaaaaagtctgtattggaaactgagtgcttatttcttctttttcttttttacttggtcttccagctattctttatttgcgatttggttagggcaggaaatcaatttaaacggatcagcgacaggcattatcttttctgtaaacgccgtatttgccctgtgcatgcagcctctttacggttttatctctgacaaattggggctgaagaaaaagatattgtttatgatcagctgtcttctcatattcacgggtccgttttatatctacgtctatgggccgcttttacaatacaacgtctttcttggcgccgttgtcggaggcttatatttgggagccgcttttttggcgggaataggcgcgattgaaacgtacattgaaaaggtcagccgtaagtatgatttcgagtatggaaaatcaagaatgtggggctcgctgggctgggcggcggctgcattttttgcagggcagcttttcaatatcaatcccaatatcaacttctggatcgcgtctgtttcagccgtcatattaacggccattatcatgtccgtgaaaatagaaatgaccgatcatgagaaaaacagagcggaatcggtccggttaaaagatgtggggcggctctttttattaaaagatttctggttttttatgatgtacattatcggggtgacttgcatttacggcgtttatgatcagcagttcccgatctactatgcgtctttgtttccttcagtgtcgatgggtaaccaagtattcggctatctgaattcattccaggtgtttttggaggccggcatgatgtttcttgcgccttttatcgtcaataagttcggagcgaaaaacagtttgattttagcggggtttttaatggctttccgcatcgtcgggtccggaattgcagttgagcctgtaggcatttcatcaatgaaactcatccacgcactggaattgccgattatgctgatcgccgtttttaaatatttggccgccaattttgatacgcgtctgtcgtccgtcctttatctcgtcggttttcaattcgcatctcaggcaggcgcgtcgattctgtcgccgcttgcgggaggattatatgacagtgcggggttccgtcaaacctatctcatcatgggattcgtcgtctttggttttaccgtcatctccatatttactttattgggcccgaaacaaaacagcaggcgtgtccagcgtctgcaaaaaatcggatagagaggatgttacaaatggacagaattcagcaggcggaagaagctttgaaggaagccgagggtaaagtgaaacaaagatatcgattggggtatcatattatgccgcgggcgaattggatcaatgatccgaacgggcttattcagtttaaaggagaataccacgtcttttttcagcatcatccgtatgatgagcattgggggccgatgcattggggacatgtaaaaagtaaagatctcattcattgggagcacctgccggttgccttagctccgggggacgaattcgatcaaagcggctgtttttcgggaagcgcggtcgatgatcatggaagattagcccttatctatacaggacataatataattgatcaagagaaagacctattctatcagactcaaaatatcgctgtcagccaagatggaaccgtgtttgaaaagcttcaggaaaaccctgttattacggaaccgccggaagacagcgcccgtcatttccgcgatccgaaagtatggaagcatcgcgatgtttggtatatggtcatcggcaactcttcaaaagaaaacgtcggacgggtcgttttataccgttcacctgatttgcgtgattgggaatacgcgggggttctcgcccaaagtgacggtaatctcggttatatgtgggaatgtcctgatttctttgaattaggcggcaaacatgtcctgctgatttcgccccagggtatcgaggcggacggcgattcatataacaatttacatcaaaccggctatttaatcggtgactataataatgaaacaaacaaatttacacacggcgcttttaaagaactggatcacggccatgacttttacgccgtgcaaacattattagatgataaaggacgcagaattgccatcggctggatggatatgtgggaatctgagatgccgacaaaagcggacggatggtgcggtgcactgactttgccgcgggaactgactttgcgtgatgatcataaacttttgatgaatcccgtggaagaaaccaagcagctgcggaaaatggaatatcgggaatgtgccggacgatcggtttcagggagttacttggcaaagacgcccgaagacctgcttgaagtccgagccgtgtttgatgtaaacgattctgatgccgaaacggcaggttttaagattcgcggccttgacgaagaagaacttgtgctgacatacaatctaacggataaaaagctgacacttgattgcaccaagatggggaaagacggtgtgagaagggtgcggctggatgcaaacggcaagctggcgctgcgtatctttattgacagatcctcgattgaagtattcgccaatcatggagaaacaacgatgacaagccgtatctatccgaatgaaggcagattggggattgagctgttttctgagaaaggcgccgtaaaggttgaggaattcacctattggacgttaaaggacatttggaaaaaaagctgaaacgggtgattatcgctttttctgaagcggctggaaatgtaccgagccgagggcagtccgcctgaaatacattttttgtgaaaatcaatgccgttaaacgatgcaggattatgcagcgtcctcgtgcagcataatcctgttgtgtataatcaaaaaagagttgctttctgtgcgtttctttattataatataaaggtatctgattgaaaaaacgtgcgctcgtagctcagttggatagagcggtggtttccggtaccacgtctgtcgggggttcgaatccctccgagcgcgtctcagttaagacgataggaaaaacctcgcagatgataaatctgcgaggtttttattttatcttgttttgaaactgttaatgaatgtgtctctgttatgttcggtgccggcaatcagccgcgcactttcactgatccgctgcgcaagagctttttgcgccttgccttcaaagctgttcaatagtgctgaatacacttcatataattcatctttcaatgtgtccatttcgaatgtcggtttcagcgtttggcgcactgtttccagttttgtccccgctgcctgcgtcatggcggttttcagcatctgccgctgcagccttttcttcatcgggtcgtccttgtgttctaaaagttcgtctaatgtcggcattatgtatccacctctatcatcttaaccagtttgcgagcatctggtctttttcctgaaattcgtccgctattttatgtaagaatccgccgatctcttcaaggtccgtgatcgccgcctgcaaagaatcaataaacgcctgctcagcctgtgtgtcgtaaaaaatcggtcctttatcgtaggattgcgcaatatcttcaattgtattggtcacgtcctgtgcttgaagctgatcaaacaagccgtgtccgacttggccgtaaaattccgttttcagctcggcgattttttcatcgtgctcctgataggcgttctgcgcttcttttttcatcgtccgcaaatcctcagtcatggcctgcaccttttcagccagcttctttgcgtttttcggcgttacttttatcgcgtctccgcttccgatcgcaccggccggcagaagagcgccgagatttttatcgaagactaactcatctccgttcggatttgtgatgtttccgtttcggtcaaatatgaaattcgcttcatttaagccgtgtgtatccggatttctcagaatgacggtagtaaagaaataagcgagatttttgccgatctgctcgttcaagttcccatcaagccgctgcttccggctgaactgtgagagtgaggggtttttcgtataaatcgttgtcccgttgtggcggtcatattcgttccaataacccgccccgaccatgtcgtccggattgataattgaccggatgtaaggatcgtatatgccgctgttgatgtctttctgtgtttcctcatcgtgcagtttcacgacggaagggctgttaaacgcgacggcgtacacatcattattcaccgcgctgtattcggcctcagcgccgccgagtgaatggccggttgttgaaataatcgttgatgttccggcatactttttctttacgctgcgtaccagctgatcggcttgatcgatttgcgatgttttcgttatcagcttatactttccggttgtgagcatggcgtcttgagagggcgttccattatattttccgagtgttttcgaggtatcctccgcgtctttttttacaatataatacacttctttttgcggatcattaccgaaaacaatattgccgccgtccgcttttacgccgtcattgatcgggtcttttccgatatcggttcccgcaaaagcgacgaccacgttttcggggttttttgattttatccattttccgtttttggacttgatgccttttgagaatacaaaggcatcaagacccgtatcagaatcctgcttcactttctcaacgtaccaatatgacgtcttacttattttataaggagttttatatttcatatgcagggctaacattttataattgtaagctgcttgactcaaacggtaatattctttatctgtgacatcagagacggttatttcttttccttttggcatatatacatcacctttcttatattgtaaaatagttccgaaaggatgatacgcatgagaaaatacattattatcctaattgttataattatagcagtgggaggttttttcgtgaagcatcaatatgataaacataaaaacgaagaaaaacttgtgattgaggcgcaagatcatatgaggaattacttaaaaaaagactataaaaatgtacaggaagttcacttttcaaaagactacaatatcgatccgacaggcggagttgaagtttcaggctacataaataataataaagaaaaagaattttccggtatatatgatccaacgaacaaggagataggtatttcagtggtcaatgccgaagaaaggtaaaatacccacctcaggatgagtgggtatttattttgtttaattatcttacaaaattcgtgatatgtttctcatacagttcaaacctattcctgagatcaatcgcctctaccgtctcatttgtcgaggtatccccgatattaacggtaaacgcgtacaaatatcatgacaactcaacgacaggaaaacgtcagatcagcattttactcgctttaagttccaatcttaacttgtcagcaacaatcgcgatgaattctgaattggttagctttgcttttgacatgctgaaagtatattcatatcaagttttcgctcatttcgtttacttaagaacgacagttatttataggaagggtttgatttccaaatgaaaaagaaaaagtacataattatccttattttaataattatagcagttgggggactttttatgaagcatcagtatgatcagaaggaaaaagagattgcgttattcgaagaagcccagaatcatatggaaaagtttttaacaatgaactataaaaatgtggataatatccatttttccgatgattaccatattaatccaatgggtggtattagtattaagggttatacgaatggaaaaaaagagtttgaaggtctatatgatccaggcaataaagaaatattatcatatacggttgatgccgaacccaaagaagaatgtaaagataagctttgtacaagataaattagccagctcaatcgagctgagctaattttgttttattgctcttactctatctcctcgacataaaacaaatcttccataggtacatttaatcctcagttaataatgaatagtgttgtgatatcatatcttgtatttgttttaaatctgcttatcgcagcctcagtagaaccaactaaatcagccaattccttctggatttgaattcctttctccttcatcacttcatttaacctagatctaactataactaacgcttataaaaaagtattctcgatcactgatacttgatacgttgatgttttttagacatgtacaacaccccgaggttgatataaatttaatctaagaaaggatgagtttgtgaagagatgcaaaattgccctaatatttgtgataactatagcgtcaggaagtatctacatgaagtaccaccatgattaaaaagaagcagaacaagaactttttatccaagcgaaaaataaaatggaaagttatataaaagctaattacaaaaatataaagcggattacatacattaacaattataaaataaatcctatgggtggtatttccttgaaggggtacttgaatggtaataaggaaaaagaatttttcggactttatgacaaaacgaatgatgaaataggagtttcgtcagtcgatgcagaagagaaacccgaatgtcaggaaaaagaatgtgaatactaaaaagacgctggaataaagaagtactctggattgccgcttatatgatcctctgcggacattaaagaaaaatcttaagaccctaaatgcatcggatgtcaccaccatttttccattccgcgagcttcatcataactgatgggacggatgattctgtgaaaaaatatattattatcttcattatcttaatagcagccggaggttttataatgaagagtatgaatgataaaaatgttcaggctgaagagataaagattgctcaagaacgaatggagaaatttatcaaagcgaattatgaaggcatacataacgttacatttaaagataaatatgaaacagatccaatgggcgggatagaggtatttggctattacaacgatgatacatcaaataaatttgacggtatttatgataaagcaaatgacaagattatgggacacactatagatgctgtgagaaagaaagaatgcagagataaagattgtgattactaagaagacgctcgtctgcgtttttttatagatgagcttaatgaaaaagacaagggtttcggcatgtgccgcccttgtcttttttattgaacactgtaaaacataaccggaaacagctcattatttgacagtccattttaacagcgttacaattaatcatgtaaatagttacatgtttaaacaaacatattgtctcgggaggtgatacgtccttgaatgaaccttctttaaaaaagtcatttatgagtcagtgaaacgcatcattgatcccgagcacgtgtatttccgcactgtgcctgtgtttgaaacaagcaatgaggcatatcagcatctgcaggaccggctgtttatcggggctgcggtcagattgccggatgacattcggttagatatttatgaaattcaataataagatggagagtgagtcaacatggaaaactttatcggaagccatatgatttacacgtatgaaaacggctgggagtatgaaatctatattaaaaatgatcatacgatcgactatcggattcatagcggaatggtaggcggccgttgggtgcgcgaccaggaagtgaatatcgtcaagctgacagaaggcgtatacaaagtgtcatggactgaaccgacaggcacagacgtttccttaaactttatgccgaatgaaaaacggatgcacggaattattttcttcccgaaatgggtgcatgagcatccggaaatcacggtgtgctaccaaaatgattacattgacgtgatgaaagagtcacgtgagaaatatgaaacgtacccgaaatatgtcgttcccgagtttgcggatattacgtatcttaacaatgcgggaatcaataacgaaacattgatttcagaagcgccatacgaaggaatgaccgatgatatccgtgcgggaaaattaaaataagagaaaaaacccggcagcttggccgggttttttgtatccttttacgagagggttttggtcatgataaagtcgacttgtttatcatcccccatataaaaagagtgttctccggtttggacaaaccccattttttgataaaaggcgattgcattttcgtttttttcccatacgcccagccagatgttctttttattgtgtgctgttgcgattttcacagcttcattcagcagatatttgccaagcccgtgtttctgatggctttttcttatataaattctctcaatctcaagagaatcttcccccattttttctgactgtgcttcgttcatgttgacttttacataccccgcaaggtcatgatgataataaacaaaatagaattgagaagacggattggataattcctttttcagctgttcagagcggaatgcattttccaaataagctttcatattttcaggtgaattttgatctttaaatgtatcattgaatgtttcaatgcttatctcccggagctctgttatatcgttaaggctgcacttttttaatttaatactcagggtcatacagctcctttcttcatttatcataccagctgaattttgttgtatttgcaatgaaaataccgtatagtaaacataccgtaattttgttgtatttgcaacataaaataagaaaatgaggacgataaagtgaaatatgttttttatgttttaggaatcatgatcttgacctttggtatttctgtcacgattcaatcagatcttggaacatcgccttttgatgcgcttattgtgggattgtccgtccatgcagggcttaccgtgggaagctgggaaatcatcatcgctttcctgttaatttgctgtaattcaatgttaaaaaggcaaagaccggaattttcagggatgattacggcgttcataacgggaatcgggattgatatgtggcttttttttctgcatcgagtcataacgcctgaactatggtacggaaaggcgggctgttttgcaatcggtttagttgtgatagggataggaaccgcaacctatctgcacacaaatttcgcaccgatcccggttgatcggttaacgctaattgtccgtgatttaaccgggagaagcatctttttttcaagaacggtcatttacttcatatttttcatactggccttgatgctaaaaggtccggtaggcatcggaacgttattaaccgtttgtttaggcgggatcttccttcatttctttatgccgattaccggaagatggatagacggcatattaacagcatctccaaagcaggaaaaaacgaaaacccggtaacggcggtttttacccgattctatcatttttcatttcacccgcatgtttaaggtataataaaaaagggggagggatttttatgagcggtcaaagaaagctcgttttttacggagctgtcagcgcagatggctatcttgcgcgggaaaatcattctttagattggttaatcggaactgaaggtgaagacagcaccgattatgaagctttctatgaatctgtcgatacgatcattatgggcagaaaaacatacgaggaaatattggttttattgcctgaggaatttccgtacaaaggtaaagaatgctatgtgttttcgcggacattgaccgggcgtactgaacatgtgcggtttattcatgaagagcctgccgattttataaatgcattgaaacgccaagaaggcaagcggatttggattgtcggcgggagtgatctgctgcacccggttttggaggaaaaacttgtcgatgagtttatcattcagatcgcccccgttctgctcggccgcggaatttctttgtttaaacccggagaccgggagacaggactgaagctgactgatgtcaggcgttacaaacaatttgcggagttgcattatgaagtgagataaaatgaaatgtatgaacgaaacccagtaaaggttaccgggtttctttttcatgtttgtttttatgttttgaaatggtgtgggccggaccgcatgaaaatcctgcaaccatgataacaacccctatccacctcacggcatagaaatcagtgtcgcgcaggaagataaatgaaactaagataataagcgccccgattataacggcagctgtgccgataatacttgatttctccatatagaaactcctttatgaatgtttggttaacgtattgggttggaatataacatatcaggggtaatgcggaaatggatatgctgcgaagctgactgatgtctgtaagatgaaaatgaaacgccaagggagccggctcccttggcgttttttatgcttgaaacaggatgcggcgttttgctgaatcgggatcactttcgacagcggtatccgtgttgaaaagcaaagtttcgcgtgaatcggtttcatattcaggccaattgaagtgagaggtgttcgggtttccggtttttgcaaaagcgagccatgcggattgaatttgtttggaaagctgttctgcgtcatcaccgagcggctcttgcagcgtctttctcaaagaatcaaagtttccgaacacaaacggcaattccagagcgtgaacggctttatgaaacggcggtgtttcgccatgccaatcaaagcggtacatccagaccggtgcgtgttgcgactgtccttgtgcgaaagcgacagccggccgccagaaaatcagatccgtcatcatatcgatttgtccctttaatgaatgcggatataaatctgccgcttgctcggtgcagttttctccgaggtgataatgcaaataatcttgctgctttttctcggagtgaatgtctgtatcaggggtgaaaaacaaatatgcttcatcacgattggttccgatgatcataggtatgccttctgcggccccgtctgctatggctttcaccggttccgcaggcaatgtggccggatcgatggcgggctgaaacaaaagctgaaaaatgttttgatccagtgagcgccgcactttatccgcagtcttaagcaggtcattaacggaaagctcctgcaattgatcagtgccggcttcatgaataaatgccgccgcgatgtcttttgccatatccgccggcatcgtatgagaggcgccgctttctaaaatggctttatgaaacaggccttttgcgtcaggcattgccataagcgcagcgatgctcatgccgcctgccgattcaccaaatatcgtgacgttatccgggtctcctccaaattcggagatattgtccctcacccagcgcagcgcggcgatctgatcgagcagcccgatattggcggaatacgcgtcatgaatagaagacaaatgtaaaaagcctaacggtccgagcctgtaattgagtgtcacgacaatgacatctccgtcagcggcaagggcagatccgtcgtaaagcggttcgcttccggcacctaaataaaatgccccgccgtgtatccataccatgacaggctttttttcgccctctgaatcgggggcgaaaacgttgaggtaaaggcaatcttcagattgaggcggtatatctccggaaaacgatatggacagcatatcatccggctgcggacaaatcggcccgaacgaatcggcatgttttatgccgtcccaaggtgcgggcggctccggcgctttaaatctcagctctccgacgggcggcttcgcgtacggtatgcccttccatgtgcgggcaccgcggccggcagttcctttcagtgcgccgcagcgggtttgaacggtaagttttgtcatgatttcatccccttttttcttttcattataaacagagatgaaggcatgaagcgaataaaagccctttcatcagcatatcatcagtaacgcttccgttctaaaaatgatctgacttcctgaacggacaagccgagttcttttgcttcctgcatcagcgctttccattcttcaatgttggattcagtcagttttctgttacggtaggatgcgggctccgggcgcttttcagtcagtttgttcgtaaaggtgaacagttcttctttcggcatgcccgactgcacggcctgcacaaggtggatgcgccactcatcttccgtgcctcccatgtgatgcagcatcgtttcggcatcaaaaagctccgtcagatcgacctgcagggtggcggatacttttttcagaaattggatggacggatttgagtgaacccccgttctatcttgcttaaataagatttagagacacctgcttcaactgctagctgattaatagagtagccttttcttctgcggtataaacgaattattcttccaatcattgtgctgaattctcccctgtatactggcatttttttgttcattataagaaatttttcgttctttataaaatttaaaattataagggaagtgcagtaaataagaggaaaatcatgataatgttctctaaaaagaactaaatggcttaatttgaaattttcaaatttcgaccttttcttttataatccaatcattaacagaagggggcgtttaagcctgatgcaataaggatgaggctgtaattacatgaatgagaatatgagttttaaagagttatttgacattattaaacacagatttttactgatttttatcatgacagcagttgtaacgctgatgacgggatacatccaattccgggtgatttcgcccgtttatcaggcatcgacccaagtgctcattcatgaaacaagcggtgaaaaaaattcgaatctcagcgacgttcagctgaatcttcattacaacaatacgtttcaaacgataatgaaaagcccggttgtgcttgagaaagtgaaacagaagctgcatctttctgagacggcatccgctttaaaagcaaagatcacgacaagcagcgaaaccgattcagagatcattaacgcagcggtgcaggacgagaacccgaaacaggccgccgctatagcgaacacgctgatgaagacatttaaaaaagaagtccgtgacaggatgaatataaaaggcgtcattgttttgtccgaggcaaaagcatcggaaagcccgatggtcaagccttcgcgcatcaggaatatcatgatggcgttcggtgcggctctcatggcgggtgtgacgcttgcgttttttctccactttcttgatgaaaccgttaaaagcgagcggcagctcagcgaaaaaacagacttgcctgttttaggggttgtgtatgacatcaaaaatcagcagacacggtctgatgaaaaacatttcggggagtgaggcgtttgggattcagaaaaaagaaatcaagaaggggactggctcaaatatccgttttacatcacaaatcattggtggctgaacaatatcgcaccattcggacaaatattgagttctcctctgttcagacccatttgcgctctattctcgtcacttcctccgttccgggagaaggaaagtcattcagcgccgccaaccttgccgcggtatttgcgcagcaggaaaaaaaggtgctgcttgtcgatgccgatttacgaaaaccgacgatacacgagacctatcagcttgaaaatgtacaaggccttacgaatgtgttagtcggaaacgcttccctcggcgaaacggtgcaaaaaacgctgattgataacctttacgtcttaacgagcgggccgacgccgccgaatccggccgagcttttatcttcaaaggcgatgggagagctgattcaggagatgtacagccggtacagtctggttattttcgattcacctccgcttttggcggtggcggacggccagattttagcgaaccagacagatggaagcgttctcgtcgtcttgagcggaaaaacgaaaatggataccgtccaaaaggcgaaagacgcgctccagcagtcaaaggcaaagcttttgggggcgctgctgaataaaaagaaaatcaaaaaaacagagcactactcgtattgagcggtgcaggtgatgtctccttacctttatcaacggaggcactcggctctgctgtgggcggcgttttccgccgccttagatgctggtcgtcggtggcggggtgtgaggacgggttaaatgcccaatttatcttaagatgatgcattgttatcggcttagctgttatgtctgtttttacgaaaaccgtatcagctaaaccgataaatgaggaggggaaagattgacttaccggagaagactttcaatgatttttgcattggatacgtatctcgttttactttccgttgttataggatatcaattttttgaggattcttatcacttttatgactccggagcgttgctgctgaccgccgtgaccatgctgatcagccatcatgtatgcgcttttatgtttcaccagtataagcaggtatggacgtatacgggaattggcgagctgcttgatctgctgaaggggatcacgctgtccgcagctgtcacagccgccgtccaatacggggtgttccacacgattttgttccggctgttagccgtcagctggatggttcagctattgttcatcggaggaagccggatgatttcgcgcgtgctgaaagaaacgatcggcaggaagcaaaatgactcttcccgggcgctgatcatcggcgcaggcgcgggaggaacgctgctcgtccgtcagcttacgcagaaaaatgatctcggaatcatgcctgtggcttttattgatgatgatcagacgaagcataagctcaaaatcatgggcctgcccgtcatcggcggaaaagaaagcattatgccggcggtgcaaaggctgagaattcaccacatcatcatcgccattccgtctctttgcacccatgagctccagacgctgtacaaagaatgtgtgcagacgggcgcccatattaaaatcatgccgcaatttgatgagatcctgctcggaacgcaggctgccggacacatcagggatgtgaaagccgaagatctcctcggcagaaagccggtcacccttgatacgagcaaaatttctgacagcatcaaagggaaaacgattctggtcacgggcgccggcggctctatcggttctgaaatctgccgccagatcagctcgtttcttccgcatgaaatcgtccttctcggccacggggagaacagcatttattcggtgcataacgaactgtccgcacgcttcggcaaagaggtgctttttcacgcggagatcgccgatattcaggacagagataaaatctttacgttgatgaaaaaatacgagccgcacgtcgtctatcatgcggccgcccataaacatgtgccgttaatggaacataatccggaagaagccgtcaaaaacaatattatcggcacgaaaaatgtcgccgaagccgccgatatgtgcggaacggaaacattcgtgctgatttcttctgacaaagcggtcaatccggccaatgtcatgggcgcgacgaagcggtttgcggaaatggtcatcatgaacctcggaaaggtcagcaacaccaaattcgccgccgtccgtttcgggaatgtgctcggaagccgcggcagcgtcattccgattttcaaaaagcagattgaaaaaggcggacccgtcaccgtcacgcatccggcgatgacaagatattttatgacgatccccgaagcgtcaagactcgtcattcaggcgggggcgcttgcaaaagggcggcagattttcgttctggatatgggagaacccgtcaaaatcgtcgacttggcaaaaaacctgattcatttatcaggctatacgacagaacagattcctattgaattctccggcatccgcccgggagaaaagatgtatgaagaactgctgaatcataatgaagtacatacggaacagatttttccgaaaatccatatcgggaaagcgatcgacggggattgggccgtgctcatccgttttatggaggaattcagccgtctgcctgaagatgagctgagaaaacggctgtttgaggcgatcgaatcagtacatgaagaagcggccgcaggtgtgtgatgggaggacagaaagatgacgaaaaaagtattattctgcgccactgtcgattatcattttaaagcctttcatcttccgtattttcaatggtttcaggatatgggctgggaggtgcacgtcgcggcaggcggcaatatgaatcttccattcgttgatgaaaagttttccattccgatccggcgctcgccgtttcatcccgaaaatctttctgtttacaggcggctgaaacggctcattcaggctaacggctacgacatgattcactgtcatacgccggtcggcggcgtgcttgcacgccttgcggcgagacaagcgcgccaaaaagggacaaaggtgctgtacaccgcgcacggctttcacttctgcgatggagcgcccctgaaaaattggcttctttattacccgatcgaaaaatttctctcttcttacacggattgtttgattacgattaatgaagaggattacgaacgggccaagcaaatgaaaaaaacagcttgcggcgcgaagaaaatacacggcatcggcgtgaatacagacaggtttcgccctgtgagccgggcagagagtgaacgtctgagagaaaaacacggcttcggcgccggggaatttatcctcatataccccgctgaattaaacggcaataaaaaccagggacttctcattgaggctgcggcactgctgaagaaccgcattccggagctgaaactcgtatttgccggagaaggcgcgatggaagagccgtacagaaaaaaggctgaatcactcggggtatccgacattgtgcggttttacggtttttgccgtgacattcatgagctgattcagcttgccgatctgtccgtcgcctcaagcatccgcgaagggctcggcatgaatctgcttgaggggatggctgccgaaaagcccgccgttgccgcagacaacagggggcaccgtgagatcatcgaagacggtgtgaacggttttctcgtgccggcaggggacagcgcggcatttgccgatcggattgaaaagctgtaccgatccccgggtctgcgaaaagcaatgggacaagaagggcgcaggacggcggaatttttttcagaaacacgtacggtaaaggaaatggcgcacatttacgccggttatatggataaaaaggagaaaagcgtatgaatgcaggagcacaaccgaaaatttccgttatcatgggaatttataattgcgaagagactttagcggagagtattgaatccatcctgagccaatcgtataagaattgggaactgattatgtgtgatgacgcgtcaactgacggaacgtatcagattgcgcgccgttacgcggatcattacagcgaccggatcacgctgattcaaaataagacgaatcaacggcttgccgcttcgctgaaccgctgtctgacatacgcaacgggggattatatcgccaggcaggacggtgatgacatctccaacccgaggagactggaaaaacaggccgctttcttaaacaagcacgcccactatcaagtcgtgggcacggggatgctcgtatttgatgaattcggcgtcaggggcgcccggcttttgccgcccgtgccgaaaccgggaattatggcgaaaggcacaccgttctgccacggcaccattatgatgcgggctgaagcgtacaaagcgcttggaggctaccggtcagtcaggcggacgcggcggatggaggatatcgatttgtggctgcgcttttttgaagcgggtttccgagggtacaatctccaggaaacgctgtataaagtaagagaggacagtgatgcgttcaaaaggagatcgtttacgtattccattgataatgcggtgctcgtttttcaggcatgcagacggctgaagctgccgatttcccattacgcgtatatcgcaaaaccgctcatccgcgccattacgccgcccgcggtcatgaaccgttatcataaaaacagggacatccgccaaaaagaagggcttgccgaacatgactgacaaaccgatgcgggtgctgcacatcttcagcgggatgaacaggggcggcgcagaaacgatgatgatgaatttgtaccggaagatggacagaacgaaggtgcagtttgattttttaacccataggaacgatccgtgcgcttatgacgaggaaattctcgctctcggcggacggcttttttatgtgccgagcatcggcagcacaaacccgattacatttgttaaacaggtcaagcgggtgattcaggaaaaaggcccgtttgccgccgtgcacgcccataccgattttcagtcgggatttatcgcgcttgccgctcgtttagccggcgtcccggtgcggatctgccattcgcacagtacgtcgtggcgggggcgggcgtcgcggcttgccgggatgcagctgtttgttttcagacggctgatcacggcaaacgccacggcactgtgcgcctgcggaaaagaggcgggccgtttcttattcgggaaagaaaaagacgtgcatcttttgccgaacggcattgatctcgacttatttgccggcgggtgcgcggacacagaagctgaaaaaaggaagcggggcattgcagacggccgtttggtgatcggccatatcggccgctttacagaagaaaaaaaccacgaatttctgctccggctggccgctgatatgaaagagcggggcatcggcttacagctgattctcgccggagacggtccgcttcgcaccgatatggaaaatctggcggcgaagctggggcttgatgatgatgtgcgttttatcggcatagaagaccgcgttcatgatctgctgaaaacgctggatgtatttgtcatgccgtctctttatgaagggctgcccgtcacgctcgttgaagcgcaggcctccggggtgccgtgcgtgatatcagacggcataacggaagaagccgatgccgggctcgggctggtcaaaaggctcagcctcaaagaaccgccgggacaatgggcatccgcggttttacgggcagcagaggcggcaaagcctgacggggcgcgtattaaagaaaccctcaggcggctgggatatgacgcgggagaaaatgcgggggctgttatgaagctttacaatatgaattggaaaaaggaacagtaacgaatgattgtatatgtagtcaatatgggaattgtttatatttggtcatggttcgcgaaaatgtgcggcgggcgtgatcaatcgctttcgaccggataccggccgaatcagctcgtcatgctcgttccgctgctatcgctggtattggtctccggtttgcgctacagagtcgggacggattttcagacgtacgcgctaatgtacaagctggcgggaaattacggcagcatttgggagatcttcgggttcggagcgaaaaaagcagccgttgatccggggtttacggctctcatctggctcatgaattttatcacgaaagatccgcaaatcatgtatttcaccgtggcggtcgtgacatgcagctttattttaaaggggctcgttgagttcggccgtccgtttgagctgagtgtatttttgtttttgggcacgtatcactattacgcttcctttaacgggatcaggcagtatatggtggcggccgttttgttttgggccgtccgctacgtgatcagcggaagctggaagcgttatatgtcaatcgtgctgctgtgttcgctttttcattcctcagcgctgattatgattccggtttattttctcgtcagaaaaagagcctggtcgcccgcgattttcggactgtcggcattgtttcttcttatgacgtttctgtatcagaagttcatttcgctgtttgtcgtcgtgctggaaaacagctcgtacggccattatgagaaatggctgatgacgaatacgaacgggatgaacgtcgtgaaaatcgcggtgctgctgctgccgctgtttttggctttctgctaccgggagcggctgcggaagctctggcctgacattgatgtcatcgtgaatttctgtctgctcggcctgctcttcggtcttttggcgacaaaggatgttatttttgcccggtttaatatatatttcggcctgtaccaaatgatcctgatcccttattttgtgaggatttttgatgaaaaatcaaatgcgctgatttatatcgccattattgtctgttattttctttacagttacttgcttatgccggtcgattcgtctgtgcttccgtacagaacgattttttcccggtaatggacactggaggtttatatggaaacacccgcggtcagtttattaattgctgtgtataatacggaaacttatttagaaagatgcttagattcattgctcaatcagtcgctcgccaatatcgaaatcgtggccgttaatgacgggtcaacggatcaaagcccggcgattcttgaaacctatcagaagcgggatgagagaatcagggtcgttcatcagcaaaaccgggggctcggcgcggtccgcaacaagggcatcgaggcggcgcgcggcgaatttatcgcttttattgatgcggacgactgggttgaacctgattattgcctgcgcatgtatgaaaaagcgaaggctgatcaggctgatctcgtgatttgcgaatatgcggctgaatttgcggatacggggaagaccgccgtttcaacgatcgcttcagcgtacgagggccgcccgaaacaacggtacctgaaagatttatttgaaggaagagtcagcggcttttcatggaacaagctgtacaaaagatccatgatcgagcatcatcagctgcgctttccgcttcgtgatgagctggagcacgtggaggatcagtatttcagcctcagggcgcatgttttcgcaggtgcggtctcgtacgtggatcagccgctctatcattatcggattcacttgacttccattgtgcaaagctatcagaaaaagctgtttgactcaggtctcgttctctatcggctgaacgaggcttttttgcgtgaaaacggctgcttacacgaataccggcaggagctggattttttcatcgttcagcacggaacagtctgcctgctgaatgaatggaagcggaataacggcggccggttttctgagaagtggaagaatatcagccggatatgcgctgatcccgtattccgcatgagcctttccaaaacgggaacggcgccgtttgacgccaaacgctcatgccttctgcttttggcgaagctgaagctgattccgttcgtgtcgctggcatcagccgcgtatcagcgggcaatcgagtacaaaatgaaaatcagagggtgaagacatgtcgatacaatctttaaaaatcaatctcgcggaatggcttttgcttaaggtcaaatacccgtcccaatttcatttcggaacgggagcggatggggcggcggggcttacagcggcaagaaaaaagatcattctgacgctgctcccgtcccacgataatctcggcgatcacgccatcgcctacgcaagcaaaacgtttcttgaacgggagtatcccgattttgacattgtcgaggtggatatgaaggatatatacagatcggcaaaagtgctgatcaaaaagcgccaccccgatgatatggtattcatcatcggcggcgggaacatgggggatttgtaccggtatgaggaatggacgcgccgctttatcataaaaacattccggcaatatcggatcgttcagcttccggcgacggctcacttttctgaatcaaaaaagggacggaaggaactgaagcgcgcccgaaaagtgtacaatgcgcatcccgaccttttgttgatggcgagagatgagacgacgtatcaatggatgaagcgtcattttcccggaaaaacagtgctcaaacagcctgacatggtcttatatttggataaaagcgagcggggcatagcgcgggaagggatctacctctgtttacgggaggataaggagagcgcgctgacggctgaggacagaacgatggtaaaagaagctttggccaaagagtacggagagctgtattcctttaccacgacggtcggccggagggtcagccgccatacacgcgaaaaggagctggaagcgctttggaatacgctgaaaggcgcggaagccgtcgtcactgacaggcttcacgggatgattttttgtgcgctgacgaaaacgccttgtgtcgtcattcgttcgtttgatcataaggtgatggaaggctatcaatggctgaaaaacataccgaacatgacattgcttgaacgtcccgaccctgaagccgtaacatccgccgtaaatcggctgctcagcggcaagcatgaggaaggcggttctttgcgaagtgtttattttgccgggctgcgctcgaaaatcagcggtgatgcccaatgaccgcgccgcttgtgagcgtgatcgtgccgatgtataagacagagccttttattaaagaatgcgcggtttctttaacaaaacagacgctgaggaacatcgaaatcattttcgtcaatgacggttcaccggatcagtcaggccggatggctgaacaattcgccgcagaagatgcgagaatccgggtgattcataaagaaaacggcggcctcagctcggcccgcaatgccggaataaaagccgcccgcggccgttatatcggttttgcggacggcgatgattatgtgacggaaacaatgttcgagcggctttatgaagaagcggagaagaaccggctggatatcgccggctgcggttattacaaagaaacgccgtctaaagaaagaacgtatatgccgccgtcccttccgccgggccgcgtcttcacagcggatgaaatgaccgcattgctgacccgcgcgcacgaacatcggtttatttggtatgtgtggcgctatatataccggcgagaagcattgcaagggctgttgttccatgaagatatccggtttgccgaggactctccgtttaacttggcagcgttccgccaagccgcgcgtgtcaaagtgatagacgaagggctgtatatctaccgggaaaatccgcaaagtcttacagaaacaccgtttaagccccgcttagatcacgaactgcaaaagcaatatgcagcgaaaatggctttttatgaggcaaacgggctgacggacgcctgccggagcgatattgatacatatttgtgcaagcatcagattccgatgctgatcgccaacgcatgcgccgccccgcagccgtcacaccagattacggcgcatatcggcagaatcttaacgtatgacatggtaaaaacggccgtgcgcaggacgccgtgccgccataaacagctgctggccggggagcgcgtggtgctcggtctgtgcaaaatgcgccttcctcttcttctgcatgcgtttttcgaacggaaatcgaaagagaaaggcagtgcggaaggagcatgaaatttgccattaatttcggcgccaatgtgacggcgtttttactatcggtgtttttatcagtgtggatgacgccctttattgtgaaaacattaggtgttgaggcttttgggtttgtccatctgacacagaatatcattaactatttctctattattaccgttgcgctgagctcagtcgttgtgaggtttttctccgtcgccgcccacaggggaacagggacgaggccaatgcgtatgtaagcaattatttagccgcgtctgtcgtgatatctctattactcgctgtgccgctcgccgggactgctttttttattgacaggattatgaatgtaccggccgggctcttaacggatgtgaggctgtctatcgtaatcggcagcgtgctgtttatgctgacgttttttatggcggggttcgcgacggggccgttttttgccaacaagctttatatcacaagttccattcaggccgtgcaaatgctggtcagggtgctgtgtgtgctcgctctgtttacgtgcctgccgccgaagatctggcagatccagctttcggcattagcgggagccgtctgtgcagctgtgctgacttttttcttctttaagaaattgattccgtggttttctttcagccgtaaaactttatcattacagacaagcaaagtgctgttttcggccggtgcctggagttctgtcaaccagatcggcgtgctgctgtttctgcagattgacctcatgacggccaaccttgtgctggggccgtctgaagcgggtgtctatgcggcgattattcaattcccgcttctgctcagaagtcttgccgggacgcttgcttcactgtttgcgccggttttgacttcctattattcaaaaggcgatatggaaggtctcctgtcttacgccaataaggccgtgcggatgaacgggcttctcctcgcgcttcccgccgcgttattaggagggcttgccgaaccgtttctggcgatttggctgggcccgtcgtttgtgcagacggcgccgcttttatatattcacgccgcgtatttggtggtcagtctctctgtcatgccgcttttttacgtatggacggcttttaataaacaaaaaacgcccgccgtcgttactttatgtttaggcggactgaatgtcatattggccgtggttctcagcggaccggcacatctcgggctgtacggcatcaccattgccggggctgtctccctcattttgaaaaatgccgtcttcacgccgctgtatgtttcgcatattaccggctttcagaaaaccgcgttttacaaaggcatgttcggcccgttggcggcggccgtatttgcctgggccgtctgccggggtatccggctgttttcaccgcttgacggctgggccggtctgatcgccgcggggcttgccgtatgcataagctatgccgcattcgcttttttcttcatttgtacgaaagaagaaaggcggcttgctttacagaaatgccgaaaagtgaaaggagctgttcagatttgaaggtgaaacgtgtatttgatatagcggccgcgacgctgttattgtgcggcgcgagtgtcattcttctcttcgccatggcagccgtcagatgcgccatcgggtctccggtattgttcaaacagacgagaccggggcataacgggcgtccgtttacgttgtataaactcagaacgatgacggatgcgcgtgatgaaaacggtgtgctgcttccggatcatctgcgcctgaccaaaacgggaaggctgatcagaaaactgagcatcgacgagcttccccagctttttaatgtgctcaaaggcgatatcagtctggtcggcccccgccctttgctgatggattatctgccgctttacacggcggagcaggcgcggcggcacgaggtgaagccggggattacgggctgggcgcaggtcaatgggagaaacgcgatttcatgggaggagaaattcaagctcgacgtgtggtacgtcgacaaccgcacctttcttctcgacttaaagattctgcttttaacagtgaaaaaagttctcgtgtcagaaggcatacaccaagccggccatgtgacggcaaagcgcttcacaggcagcggagatatgtcatcgtgaaaaaggtcgtgctgatcggaaacggcggacacggaaaagtcgtgaaggaaatcgtgcaggcccgttccgatatggagcttgcgggcatattggacgacggattcagcggttttaccgctcggaacggtttatatacgggccggacggaagacgtgcacatgcttcggaaactcgtccccgaggccgtgttcacgatatgcatcggccgcaacggcgtcagaaagcagttcgctgaaacgcttgggattgaagctgccgattatgcttcactcattcaccccggggcgatcgtcagtgaaacggcttccgtcggacacggaacggttgtgatggcgggcgccgtcattcaggcgggcgctgacatcggcgcccattgcatcatcaatacgggggcggttgccgatcacgacaatgcaatcggagattacgtccatctttcaccgcgcgcggcgcttgccggcggagtgaaagtcggggaaggaacgcacatcggaatcggcgcgtccgtcataccgcagatggacatcggcccttggtccgttatcggcgcgggggctgcggtcatcagcagaattcccggccatgtgacggcggtcggcgttccggcccgcgtcatctcccctatccataatgaaaaaggatgatttcatgcaaacaaacaaacggatttatttgtctccgcctcatatgagcggaaaagaacaggaatacatcgcagaagccttccgaaccaattggattgccccgctcggtccgctcgtcaattcgtttgaagcgcggctcgcggaatatgcgggagtgaaaagcgcggcggccttaagctcgggaacggccgccatccatcttgccctgcggcttgcgggtgtgaaaaaaggagacgttgtattttgtccttcctttacgtttgtcgccacggcgaatccgattgtgtatgagcaggctgagcccgtttttattgattcggaatgggagacgtggaatatgtcgcccgctgcgcttgagcgggcgctccgggatgcaaagcggcgcggcagactcccgaaagcggtgatcgccgtcaatctttacggccaaagcgcgaaaatggatgaattaatgagcctttgtgacgcatacggcgtctgtctgattgaagacgctgccgagtccttaggatcaacatataaaggcaggcagagcggcacgttcggccgtttcggcatttattcctttaacggcaacaaaatcattacaacatcgggaggcggcatgctcgtgtctgacgatgaagccgcgattgaaaaagcgaggtttcttgcgtcacaggcgagagatgccgccgttcattaccagcacagcgagctcggttacaactacaggctcagcaacattctcgcgggcgtggggatatcgcagctggaagtgcttgaagatcgcgtccgggcgaggagagaaatctttcaccggtatcgggaagcgctcgaaacatatccgggcatccgcatgatgccggagcttgaaggaacggtttcaaaccgctggctgacggctctgacgcttgataacggcgtgacgccggaagaagccgtcgcctgtcttgcggaacagaatattgaggcccggccgctgtggaaaccgctgcacacgcagccgcttttctcatcttccgtcttttatcctcacagcgaccatgagcgtgtctctgagaaccttttcagccgagggatttgtctgccgtccgggtctgacctgtcttctgaggagcagcagcgtgtcattgacgcacttgcgcaactgtttgaaacgaaaggggagaaaacatggacagccgccatgttatgagccgattaaaagagacgctgacgggtctgctcagcgttataccgccgcaatccgacatcatatatgccgactatcccctctacggaaatgtaggggatttattgattatgaaagggacggaggcgttttttaaagcgcacggcatccgcgtgaaacagcgctggaatcccgacaattttccattcgggcgccgggcggacaaaaagacgatcatcgtctgtcagggtggcggaaatttcggggatctctatccgtactatcagacgttcagggaaaaaatcgtcaaatcctttccggaaaacaggatcgtcatcctgccgcaatcgatttattatcaggatgagacacggctgcaaaagacatcggcgctttttgcggagcacaaggatctccacctgtttacgagagatcatgtgtcatacgagactgcgaaacgctttttttcggcgaatcatatcgggcttatgcctgatatggcccatcagctgtatccgatcgcggcgtcagcggttccgtcacgcggcaggctttattttatccgcacggatggggaaatcaacccgaagctgcaaaacaattcttccgttaaaagctgtgactggcaggatgttctgtcagcaagcgaccgcaggggaatcgcttttttccaaacgctgaatgttttgaataaaaaagcgggaaacccgctgccgattgcgcggttttggaaccgctattccgatttcttaacgaaaaaagcggtcctgtttttcagcaggtacgaatcggtggaaacgtcaaggctccacggccacatcctgtcctcgcttctcgggaaaccgaataccgtcattgataattcatacgggaaaaacgcgaactattattacacctggacgcacgaagcgccggacgtccggctgatcggtgaaaccgccggcacgaaggaaaaccttccgctttgaatgagcggaaggtttattttgtttctccgcgttttactttgttgtacgcctcatccaaatgctgaattcttttgagcacaaccgagtttttcgtcagctgatcctgtacaagggttgagacgacggagcggtaatagctgttcatcgcatgaattcggtcttcattcggattcatttcaatgtgctgtgtaaagttttcaataaaatagggaacagaaaaaagttctgacatctataaagcaactccttttaataagtatatacggtatgaaaccaatcatgtacaatgaaaaaaggggagtgagcatgatggatatcaaacttcagcaaacacaaatgttaaagcctcaattaacgcaagagcttaaacaggccatcacattactcggatacaattccgcggaactggccggatatattgatgagctctcactggaaaaccctctgattgaacgaaaggaaacagacacgccgccactatcttaccataaaacaaataaaaacaggatgaaagaacgggacggaagccagcagatcagacttacccgcaaaacgctgcaggattcgctcaaacagcaagccttagacatgaagctgtccgatgatgagaaaaaaattttcaattatctgatacattcattggattcaaacggttatttaaaagaggacataccagccgccgccgaccatgtatccgcttcacaagaggagacggaagcggttctgaaaaagcttcaatcccttgagcccgcgggaatcggcgcccggtctttgcaggaatgcatccttcttcagctccgccgtctgcccgagcggaacgaacaggcggaatggattgccgaagcctattttgagctatttgcaagaaagaattggaaagcgcttacacttaaaacgggcattccgcttaaagacattcaggacatcgctgacatgatcagcgcgcttgatccgaggccggggctccgttatgcgcatgaggagccgggtttttacgtagaaccggatattttcatcacggtgaaaaacggcatcattcaagcgcggctcaacagccgttcgtttcctgacatccagcttcatgcccattatcagccgctcttgtcagccgccgggtgccgtgacacgaaaaattatctgtcggcaaaatatcaggaatggcgctggctgaaccgggctttgtcgcaaagaaaacaaacgatcacgagaattatcggcgtcctgactgaacggcaggaatccttttttctcacaggaaaaagcggaatgcagccgctgaccttaagagaggtggcggaaacgctggagctccacgaatcaacgatcagccgggccatcaaagggaagtacgttcagacgccgtacggactgtatgaaatgaaaacatttttctcggcgaaagctgaatcatcgggggacggcggcgcctccaattatgccgtaaaagcgcatctggaagcattggtccgtaaagaagataaaaagaaacctttttcagaccaaaagcttgccgatctgctgcatgaacaatatgacatccgaatctcaaggcgcaccgtcgccaaataccgtgaccaattaaatattccgccgtcatcggcgagaaaacggtacagctgaaacctccccgagccaaaccccggggaggttctccgtgttacgggatcatccatgaaaacagatgatgctgtaaaaatgtaatgagacagacgagcagaagcaaaaacagactgtgcttaatcgtaaagcggaaaaggtcggcttccttgcccgccagaccgacagcggcacaggcaaccgcaatggattgcggagaaatcatttttccggtgacaccgcctgatgaattggcggcaacggagagaaccgggtccatcccgacagatagcgccgtcaccttttgcaatccgccgaacaataggttggccgatgtatcagagccggtaataaatacgccgagccagccgagcaccggcgaaaaaaaggtaaacatcgcgcccgtcatggcaagcgcaagaccgagtgtcgtgctcatgccggaagcattcgtcacatatgcaaagccgacaacagaaacaatggtcacgaccggaagcgttaactctttcaccgtttctataaacgcttcgccccacgtcttccacgacatgccgagggcgaacttggagatgacggcggcaatcagaatcgccgttcccgctgaaccgaaaagctcaagtttgtacacggcttcaatcggcgtgccgtccgcctgaagaatctgctgatttacaaatgggacgggaggcgtgaaggtcaatgctttcccggctgcattcagccaggaaagccacattgacgttccttcataatgaccggttaaagcagccttcacgccgggaatcccccaaacggatatcatggccgtcagaagaaggaaaggagaccacgctttaaacaccgcggcgcccccgtacttgatcggcgcccggtcagcggccgctgctgattcccgttctgccgcgaaacgaaaggccgttttcggtttccaaaatttcaaaaatacagcgagcgcggccatggaaacaagcgccgacagcacatccggaagctcaggccctaaaaaattcgagcttgcgtactgcacggccgcaaaggagacgccggaaacaagaatggccggccatacttcaaaagcctttttaaacccgctcatcaaaatgattaagtaaagcggaataaagacggataaaaaaggaagctgccggccgaccatttgggaaatttccattgccggtatcccggtcggaccttcgacggcggtaatcggaatgccgatcgcaccgaaggcaacgggcgccgtattggcaatcaggcaaattcccgccgcatacagcggctgaaaaccaagtccgacgagcaaagcggccgagatcgcgacgggagcgccgaaaccggcggcgccttctaaaaatgccccgaatgaaaaggcgatgagcagcgcctgcaaacgccggtcatctgtaattgagagcaccgaactccggataatctcaaactgtcccgttttcacggtgattttatacagaaagaccgatgtgacgataatccagccgatcggaagcagcccgtacaccgctccctgagaagcggacatcaccgctttttccgccggcatgccgtaaacaaatacagcgattaaaagtgaaacggctaacgttaaaagccccgctatgtaccccttcatccgtttcaccgcaagcgcccaaaaaaagaagataatcggcacgagcgcgcaagctgccgataaaagcaaatttccccctaaaggagcgtacccctgtgtccattgcatccctaaaaaacccctccttatgtcatgtaaacgattactttttatgataaggtcatctgatgaccgggttaattagcattatattttgaaagttttgaaagtacaatacttttcttgaacaaattgtctgaacctgtcggctacacaaaaaaagaagtataatagacgataaacatcaagattcacaagtgacggggtgatcgcgttgaaatataaacaaattaaaacgaaaaaaatctacgaggaagtcgctgacgcattgctggagaagataaaagcgggcgagcttaagccgggggaaaagcttgattctgttcaggcgctttccgagagttttcaggtcagccgctcggcggtcagagaagcgctgtcggctttgaaagcgatggggctcgtcgacatgaagcagggagaaggcacatacataagagaatttgagccgtctcatgtttcccagccgctttcttccgccctcttgatgaaaaaagaggacgtcaaacagctgctcgaagtcagaaagctgcttgaactcggcgtcgccgccatggccgctgaaaaacgcaccgaagacgatttacaaaaaatccgccaagctctcatggagatgaaagacattgacggagacgaagaattgggcgaaaaagcagatttctcctttcacatggcgctggcggaagcatcacaaaacgggctgcttaagcatctcatgaatcatgtctccgcgctccttttggaaacaatgagagaaacgagaaaaatttggctgttttctaaacgaacgagcgtgcagcgattgtatgaagagcatgaacgcatttacagcgccgtcgccgccggagacacggatgaagcggaagcagcgatgacggcgcacctgacgaatgtggaagaagtgctgggggcttattttgaagaaaatgtatagaagctgacttgtgaaaggggataacatcacatgcaggccgaatcttttttttctgaccatgtaaagaaagctctgacaaatgatcctcccggggaatggatgccggcagttccgaaagcgtgcatccctctgcattccggctatcccgatcccgcgctcgttcctgataaggagctgaaagaagccgcctcccgccttctggatgaggagcgtgatctgccgctgcattatataggaagcccgaggacggccgttttaaaaaagcagattcaagaacggttagccatccgcggcattcactgccgggacgatgagctgatcgtgacatcaggcgcctgtcaggcgatagatctggctgcgcgggttttcctcgatgaacaaaccgccgctgccgttgaagctccggtctatatggaagcgctcgagatttttaaaaattatacaccgcatatcatgagcattccgacagatcaagagggtctgcaaacagaaacattagcgtttatgcttgaggaaagaaaacgaaaagggcttgtgcttccccgtcttctctacacgatacccgcttttcagaatccggcgggaaccgtaatgtcatcgaagcggagaacccgcctgcttcagcttgccgaaacgtatgattttctcatcttggaggatgatgcatacggcgagctcggattcaccgatattccgccgcccttgaaagccatggatcaaaacggccgggtgctgtacgccggttcattatcaaaagtcatcgccccgggtatgaggatcggctggattgcaggggacgccgcattcatcacggcattgtcatggttaaaaaaagacttaggccatccgttttcccaagcggtgaccgccgtctatctggaacaaacgaatattgaagaacggctcgccgccttgcgggaagcatatcgaagcaaacgtgatgttttgctcgccgcatcagcgcgatatcttccggaatccgcatcctggcacgtgcctgaaggcggttactttgtatgggtgaaagcgccgggggctgatacgtccgcactgctggcgagggctctgtctcacggcgtttcctatgtacccggaaaatatttttttccgcatcaggaagacggtgccgaatatctccgcctgtcgttcagttttcccggtaaagccgcgataaaagagggtgtgcaaaaactgggacacctgctgaaaaacgggatctagagaagcatgggaagctttcaggcttctcttttttttacccttcagcgcatcgggcgaaaggatttttcagaaaaaccttccaatccatattcagaatagtgtaggatatttatagagctttccaaaaacaggtcatcagatgaccggatcacatactgaggatgaaagaggggttcatcatgaaagtctcattatttgtcacgtgccttgtggatatgtttcagaccaatgtcggaaaggcgacggttgaggtgctggaacggctcgggtgtgaggtggattttcccgaggggcagatttgctgcgggcagcccgcatacaacagcgggtatgtgacggatgcgaaaaaagcaatgaagcggatgattgccgcgtttgaagaagcggagtacgtcgtcagcccgtcaggttcctgtacgacgatgttccgtgaatatccgcatctgtttcaggacgatccgaagtgggccgcaaaagcgcagcagcttgcggacaaaacatatgagttaacggattttatcgtcaacgttctcggggtggaggatgtcggggcggtgctgcataaaaaagcgacagtccatacatcgtgccacatgacgaggctgctcggcgtgtcggaggagccgatgaagcttttgcgccatgtcaaggggctcgagctgaccgcgcttcccggaaaacaccaatgctgcggattcggaggaacattttctgtgaaaatggcgcaaatctctgaacaaatggtggatgaaaaggtcgcctgcgtggaagacacggaggccgaggtgctgatcggggcggattgcggatgtctgatgaatatcggcgggcgtcttgaccgtaaggataaaaacgtcagagtcatgcacatcgcagaagtgctgaacagcagataagacgagaaacaacaagggggtaaaatcatggcgatgaaaatcggtaccgccgcttttaaagagcgggtatcagaaggaatagataatgagtttatgagaggagccgtctccggagcgcaggaacggctcaggataaggaggcttcaggcggccgaggaattgggaaactgggaggattggcgttcacatgcggaagaaatcagacagcatgtgctggacaatcttgatttctatttggaacagctcgccgaaaacgtcgccaacagaggcgggcatgtctttttcgccgaaacggcggaagaagcgtcctcctatatccgcgatgtcatccggcagaaaaacgccaaaaaaatcgtaaaatccaaatccatggtgacagaagaaatcaatatgaacgaagtgcttgaggaagagggctgtgaagtcacagaaacggatctcggcgaatacattctccagattgacgatcacgatccgccgtcacatatcgttgctcccgctcttcacaaaaacaaagagcagatccgtgacgtgtttaaagagagactcgaatacaaacagacggaaaaaccggaagagctcgtcatgcacgcgcgcagcgttctccggaaaaaatttctcgaagcggatgtcggcatcacgggctgcaactttgcaatcgcggataccggatcggtcagtctcgtgacaaacgaaggaaacggccgccttgtgtccgcgctgccgaagacgcagatcaccgtgatgggaatggagcggatcgttccttcattttctgagtttgaagtgcttgtcagcatgctgacgagaagcgcggtcggccagcggcttacaagttacattacggcgctgacgggcccccggcagcaaggagaagctgacgggcctgaggaatttcatctcgtggttgtggataacgggcgttcccgcatactcggcacggaattccaatcggtgctgcaatgtatccgctgcgccgcctgcatcaacgtctgtcccgtgtaccggcatgtcggcggacactcgtacgggtccatctattcgggtccgatcggcgccgtcttatcgcctcttctcggcggatatgacgaatacaaggagctcccgtacgcatcttccttatgcgcggcctgtacggaagcgtgtccggttaaaattccgctgcacgagctgctgctcaagcatcggcagaacattgtggaaaaagagggcaaagcgccgatcagcgaaaaactggcgatgaaagccttcgggctcggctcgtcatccccgtccctttataaactgggatcgaaatgggcgcctgccgccatgacgccgtttacggaggatgacaaaatatcaaaagggccggggccgttaaaagaatggacggcaatacgggacttcccggcgccgcataaatcgagattcagagattggtttaaagaccgggaaaaacaaaagggggaagaatgatgatgaaagggacggttacacatcaggaatcctttctaaaccggatcgccggaagtctgggcagagagcgcaggaaatcaggcgtgtccctgcctgaatggaagtatcagcctcaatatcaaacgcatgcggactgtacggaagacgatcttgtcacgatgctgaaagaccactgcgtcaacattcataccgaactgatcgaaacggatgcagccgggctttacgacgctttgcgcacgcaggtgaaccgctttgaagggggcctgtcatcattccgaacgacagccggtttgaaatgtacggcttgcagacccttatgacagaagagtggccggacgaagggattcccgtttgggaatgggacgcggaacaaggagcgaaaaatattgaaaaagcggaacaagcgaatgtgggcatcacattcagcgagatcacgcttgcggaatcagccaccgtcgttttgtatgcgtcagagcatgccggccgttccgtcagcctgcttccgaccacctatatcgcaatcatcccgaaatcttccattgtgccgagaatgacacaggccagcgatatactgaaacagcagatcagagacggcgtcaccgttccttcctgcatcaactatattaccggaccgagcaactcggccgatatcgaaatggatttggttgtcggcgtccacggacccgttaaagccgcttatatcctcgtgaatgaccgataaaaaaacaaaccccggtttgcggccggggtttgtttttatataaacgcgttaatgatcatgataaaacagatcgcactgacagaaataatcgtttccatcgccgtccatgtcaggaacgtttcttttaccgtcattccgaaatactctttaatgagccagaaaccggagtcattgacatgtgacagaatcaaagagcccgctcccgttgccaaaacgagaagctcgctgctgacgcccggcatgacagatgcaatcggagcaacaatgccggccgccgtcatcatggcgacagtcgctgaacctgtggcgacacggatgaccgccgcgatcgtccagcttaaaagaacgggagagaagcttgagtgcttcgccatgtcagcgatatacgtgccgacgcctgaatcaatcaggacgttgttaaaagcgccgccggctccgatcacaagcagaatggaagcgatcggtcccagacagtcattgctgaattttaaaatgctttccctgtcaaagccctgataaaaaccaaggctgaaaaaggagtaaaccgtggcgatcaaaagcgccgtgacagggtcgccgataaatttaaaagtttcatagagcgtgcttttttccggaagcgcaatttcggcaagcgttgccataagcatcaggatcaccggtaccaatatcgtaaacaatgtatttgcgaatcccggaagcttgcgtttttcattccgttcaataaattgttttttcaacagttcgggaacgggtttatgaatgcgcttaccaatccattttccgtaaagcggccccgcgatgatggcagtcggaataccgacgattaaagaatacaaaatcgtttttccgacattggcgtgataaatgccgacagccgccatcgccgccgggtggggcggaaccaatccgtgcacgacggaaagtcccgcaaggagcggaatcccgatcgtcactaatgaaaccccggtttcaatcgcaatcgtaaacaaaagcggcacgagcaggacgaagccgacctggaaaaagaccgggatgccgacaataaaagcgacggccatcatcgcccaatgcactttctttttgccgaagcggccgatcagggtgtgggcgatccgctccgcaccgcctgattcagccatcatttttccgagcatcgtaccgagggccagcacgatcgcaagcagagacagcgtattgccgagcccggttttcattgaagtgataatgtccggcagattcatgcccgttgcgaaaccgacaaggatggatgtaatcaaaagactgataaacggatttaatttagcgaccgtaatcaataagagtaaaacgataatagcggcaatgacaataaacagtaacatgaccttttcaccctttctttcaaagaagaattaacggctttgtttgagctgaaattcactgatgacgtcaaattcatctttgagcttgtcatacagccgctcgtataagtaaaacagctcaatatatgtttcgctgtttttgacgttcggttcatggcggtgcgaaattctgatccagtcctgaacatcctcgatccgttccatttcgccaaggctgtgcaaagcgagaacggccgctccgagcgcagaggcttcgtaactttccggaacgaggacttcgcgtcccatcgtatcggacaaaatctgcctccacagcggcgatctcgcaaatcctcccgaagcccgcacgtcttttgcggggcccgccaaatctctcagtgcgacaccgattgaaaagacgctcatgatgacgccttccagcaccgctctgataaaatgctcccgtttatggcggaggctgatgccgaaaaacgttccgcgggcattcgggttccaaaacggcgcgcgctcccctgataaaaacggcagaaacagcaatccctcagagcctgcgggcactttatcagcaatatcaatcattaaatcgtacggatcaatgccgagccgcttcgccgtttcaacttccggagaagcgaattcgtctcgaagccagcgcagcataatgcctccgttattcgtcgggcctccgatgacccaatgcttgtcagtcagcgcgtaacagaatgtccgcgctttttcatccgtaatcggcgcatccgtcaccgaacgcacggctccgcttgttccgatcgtaacggccacttcgcctttgccgatcgcgccgactcccaggttggcgagcacgccgtcatttgcgccgataataaacggtgtatccgcatggatgcccatccgtgcagcgatttccggcgcaaggccgcgcagctgatgagtggtcggcacaatgtccgacagctgatcttcccggattccggcaatcctgagcgcttcttcatcccaggaaagcgtatctaatcggaacagtcccgttgccgaagcgatcgaataatcgacgacataagttccgaaaaactcgtgcagaatatattctttaatactgatgaatttggcggttttcgcgaatgtctccttgtcctgttctttcatccacacaattttggaaagcggagacatcggatgaatcggcgtacccgttcttttataaatatcaaaaccgttcatctcttttaaaatccgttttgattgctcggcgctgcggttgtccgcccaaatgatgcttttggtcagcaggccgccgttttgatcgacagctatcaatgagtgcatggcggtgctgatgccgattgcaagcagattgtcaggactcagtccggcctttgtgacggcgcccctgatgcttccgatcaccgcttccaaaatgtgctcaggatcctgctcggcccatgccggctttggctgtattaaatcatagtgaaccgaatgcttggctaacactttgcctcttggtccgaacagaacagctttcgtactggtcgtgccgatatccagaccgataacagcttgggtttccttcataatatatcccgcctaatctgattgaataataagatagatttataatgtatgcccttacaaagtcaattataggaataatttttttataaatcaacgatgaagaagaaaaattttttcataaaattgcctcaattcccgctgtatcggctttctctcttttgaaaaaaatatttagaaaacgattacaaacgtttgtgcgcgatcatttttctgatttgctgcaagttggcgagcgttttctcctgccgcagccgggccgtggcgaaatacagtgtatcaatgaccgacagctgggcaagccttgcggacatcgcctccgttctgaaagccgtctcccttgttgatgtatacagcacaacgtcggaaatctgggtgagcggcgacttttggtagcttgtaatgccgatcgtgccggcgccgagcgatttggccgttttgaccgcgtcgagcacgtccttgttgctccccgaatgagaaatgccgatgactgcgctttcaggaccgagaagacccgctgacatcgcctgaaagtgagaatccgtatgcgcgatgcaatttatacccgtacgcataaatttatgatacgcgtcagtggcgatcagcccggaaccgccgtttccgtaaaattcgattctgtctgcgcggtggatcatttctaccgctttttcaacgtcggccggatctaataattgaaaggtatcggtcagaccggaaatgtttgtgcggaaaactttccggatgatgacttcgatatcgtcgtcggggctcatttcttcatgaatgtgctgcaccggctcctgaacgatctcctgagccagcgcgatttttaaatcctgatagccggaaaaaccgagccgcttgcacagcctgaaaatcgtcgcttcagagcttttcgttttttcggccagctgaatgatggaaaggtgaaccacgtctttcggttccttcacgatatggtctgcaatcgctctcaattttggcgacaaacctttgctggccgcctgaatcttcccgatgctgcttgaattcacaggggtcatactataacctccctactcgaatgtaaacgcatacttttatgataaagcaagtttcaatataaggaaaacagaattttaaaattgttttttcaattttgtgtgtaaaaaaagagaaaaagccgccgatgatagaaagtgaggaggcatctgaatgaaaaaagcatggattctcgtcatatcattcggcattgcgcttgcgctgtttttatacgcaaacacaaaggtgaaagcggaaagcatggcgccggaaagcaaagccttgtgtccggatttcagctgaaatttccgaatcaccgggaaggacaatagacggaaaaaattagtattgactttgaaaatagaagactgtatattatgttactatattcagaaaataaaaactcaagagattcatttaacataaaacactgtgaacgggagcagtaagagaatccagtcagaaaaagagagccgcgggttggtgaaacgcggactgattgttctttgaactcgcccggaagtggcagggcggaacggaattgtcggaatattccctatgtcctaacggctgaccttcgttaaaaggtttttaagctggattccggatattcgggatcaacaagagtggtaccgcggctgcctgaggcacgccgtctcttttcctaaagaggcggcgtgcttttttatgtgatgaacactttttgcgagagggcgtgtgatagatggaaaaggacaagcaaacgttaaaacggacgatgtcgtccagacacattatgatgatggcgcttggaggcgcaatcggggccgggctctttaaaggcagcagcacggcgattgatgaagcggggccgtccgtgctgttggcctacctcctcggcggaatcattctgctgtttattatgcaggggctggccgaaatggccgtcagaaacaaacatgcaaggacgttccgtgatttggttcagcagtctctcggttcgtacgctgcatactttttagactggatctattggaaaatgtgggtgctcaatattgccgcggaggcggtcgtagccgccattttcattcaatattggctgccggaatgtccgatatggatactggctttgatcatttccatcgtggtgacggtcgtaaacatgctttctgtgaaactgtttgccgagacggagtactggctcgcgctcattaaaattacggtgattgtcatctttattttatgcggaattctgctattatttttctcattcggcaatcacacggcgccggggctgtctcatttaacggatcacggagggtttttcccgcatggagcggggggcgtcattacggcgatgctcgtcgtgatctactcatacggcggaacggaaatcatcggcgtcacgctggcggagacaaaaaaccccgaaaaggtgattccgaaagctgtccgaagcacgttaacgcggattgtcgctttttacttgctgccgtttttcatcatcgtcagcctgattccttggaatcaagtcaacagcgttcccgaaagcccgtttgtcatagtatttaagatgatcggaattccgggtgccgaccatattatgaatgccgtcattcttcttgcgattatctcgtctatgaactcgggactgtacggatcatcccgcgtcttatttacgcaggcttctgacggccgggtgccgaaaatcttttcaaaactatcgaagaaaaaggttcctgtctatgcgattctgacttgtacgtcatttttatatgtaggcgtcctgatttctttattcgcaggaagccggacgtttaattatttgatgggttccctcggctataccgtgctgttcatctggctgattatcggattcgcccatttaaaatcaagaaaacattcaacagaacagccggcttattacgtcaaatggttcccgtacacgacatggttcgcggtgcttgcgcttttggccatcctgatcggcgtaattgcgacgacgtccatcgtcatcacatgcatcactgcggccatctacctgctcattacggctgcgtatctcgtgaaagggagacgtcaataaataaaaaaactcttgccccgcggcaagagtttttttaatgaacggcctttttttctgcggccagagcaggtgttttcagtttcttcggtgttatattcacaaaacaaatgcttgtgacgatcagaagcagtccggctaaaaggctgacggtcagcggctcatgcagaaatatcgagctgacgacaatggatatgagcgggatcaggaaggtgtaagaggcaaccttgcttgcttcccctgaaccgacaagcgtaaaaaaggcgagccagccgagtgcgatgacaaataccgaaatgaacagaaggctgagaatgaacggagttttccattgaatcgctgaaaagctttctgaaaaatggccggagctgacaagcagcacgccgccgatcagaagctgaagagcgaccatccagatagagtccgcgcgtccgcccgttcttttcacatataccgtgccgagcgcccagctgaccgcggagcccagagccaaaagaatgccggcgatggaaatatggcctccgaaaccggctgcgctgatgacggcgacaccggcaaagcccagaataagaccggctatttttaaaggatacatcgattccccgagccacagccaagaaaaaacgcccattaacaccggctggaaaaacacgatggctgaaaataagccggcatgcaggtaattcaagccgaccgtttgcaggccgtaaaataaagtaatatttaaaatggcagaaataagatagatcggccacgtttctttaaaacgcagctttttaaaacggggcagcgccaccattaataatagaagtccgccgatcagcgtgcggattccggcaaacagaagaggcggcgaataggcgagcgcggcttttgtcagcggccagttaattccccataccgtgactagaaacgccagcataagagccgtctgtattttcgaaagctgtttcacgtcgttcactccttgtagaacaattccatcatatgatacggtaatcagtaagataaataaaatgaatcttttttataaggagcataagtaaaacgttatgacgattacacaactgcgggtttttgttcaaatcgctgaaacgggaagctttacaaaagcggggcaggcgctgaatatgacacagcccgccgtaagccatgccatctcggcgcttgagtcagagctcggcatcaagctgatcatccgcgagcgccgcaacggcgtaaggctcacggacacgggcggaaaaattctcgttcatatcagagaggtgctcaaaggcatagaaaaagccgagcagctggcggccgcggaaagagggcttgaacagggaacgattcacatcggcacatttccggccgcttccgcttatttcattccaaaactgatcagcgtgtttaaaaaacggtatccgaaacttgagttggtgctttatgaaggaacggttaacgaagtaaaggaatggctccgctcccgggtaatagatgtggggatcactctttttcctacggaagacatggaatatctgccgctgaaaaaagataaaatggccgtcgtgcttagaaatgatcatccgctttgcagctgtgagtcaattactctgaaagatcttgaccgccagccgatgatcatctgtgacggaggatacgaatcaccgtttattgatatgtttaaggaggcagggtctgtgctgactgccgcattcactgtttacaacgtcaatacgtccatcagcatgatcaaagaggggctgggaattgcgatattatcacaaatgtctatgtccggaatatcactgccggaaaatgtcgtgacaagggaactcaatcaggcggtgtaccgtgatgttctgcttgccgttccttctgtaaaagaggcttcattggcggcaaaactttttattcaaatcgcgcaggagctcacaaagaatgaataaaaaggccctaatgatcttagggccctgaatcttatcggttaattttaaaagagtttgtcgtattgacaagttttgaaccgctgaacgtagctttgacacgataataacctgtcttgcatccttttaaagagaatgacttagtcacccttactgagaaagaaaaggttgtttttttgcaagtcgtccatttctttccggactttcgctgtaagtataggtttcctttaaaggttcgatctgacggatacgctgtactgagagtaaaatcgacacttttcgcttttttcgtgtagtaggaggcatcggtaaatccgcttacatttaaatgctgctgagtgccggaataaaagtctgcggcatatgccttatcggtgtttccggtaaagaagattgctgccagtaaagctgttgtgagtgccattaagatttttttacgcatatagactatgacttccttcctattcaatatatgacatatgttaacattattggttctgttctttcaatgatatcttttcatttttatatcattctaggctcttcatatctgaatgtaatagattcattcatacagagttcactagtgacgaccgctgactgattgttcgaagatcatcgaatcaaattgtttaactcacgggaaaagctgtggtaaggtgtgtggtagagaccttgtttaagatctgcttacactaaaccataaaggagaaaacgatggctgaacatacattgaaagatactgcgttttccgtattgaatttatcgccggtcgtacaggggggaacggttgctgaatcgttccgcaacagcatggatttagcgcaccgcgccgaggagtggggctataaccgctattggctggcggagcatcataatatagaaggtgtcgccagctcggcaacggcggtgctgatcggccacatcgccggcggcacgaaaaaaatccgcgtcggttctgggggcattatgctgccgaatcattcgtcacttataatcgcggagcaattcggaacccttgaaacgttatatccggggcggattgacctcggactcgggcgtgcgccgggtaccgaccaattaacggcgagggccttaagaagaaacataaacagcggggaggatttcccggagcagcttgaagaattgagaaattacttcaaaccctcaggcaatgtgcgcaatcaagtccgcgccattccgggcgaagggctggacgtgccgatctggcttttgggatcgagcggcttcagcgcgcgtcttgcgggagagctcgggcttccgttcgcctttgcggctcacttctcaccgaaaaacaccgtgcccgcccttgagctgtaccgaagctccttccgtccgtcagacgtactggatcaaccgtacgcgatggtcggcgtcaccgtcattgccgccgatacggatgaaaaggcggagcatctggcgacatcgcattatcaaagatttttagacctcgtccgcggcacgccgaaccagctgaagcctcctgttgaagacatggatcaaatctggtcgccgtatgaaaaagcgatggtcaatgaacagctcagttcaacgatcgtcggcggaccggagcgtgtgaaggaaaagctggaaagcttcatccggacaacacaggcggatgaaatcatggtgaattcagaaagctttgagcatgccgacagaatgagatcatttgagatcatcgccgaattaaaaaacagctgagcaaaaaaagcaatgtgccgcgcacattgctttttttattcgccgatccgcctgacggaatttcggatgacgagttccggttcatacacgacgtcatccttcttcggttttttatgctctaagcagccgatgacgtattttgccgccgctttccccataatggatttcggatgcttgacagaggtgagcttcacctcggaaatctgggcgaaatgtgaatcatcatagcccatgattgacacgtcatcaggcacctttaagccgaattctctgagaagattaatcgtcttcagcgcaatttcatcattataacaaagaatggccgtcgggtatgatccgctgttttgctcaagggtatgcttaattttttgaagaagcacggtttctttttcttcagtcgtgtaagtcacgatcatgtccggagacggaaaaatcccgcgctcccggtgcgcctgaagatagccgttcatccgtttgacgccctgcgtgtcatccgctttaaagattcccataatgtgcgtgtggccgagggacatgacgtattcgcaagccatcatgccgcctttgacatcattgacggaaaagctcggtgcggccagctccgcataagaggcgttaatcatggcaaacggaatgccgtttttctccaggttgagatagtagccgatgttgggcgtctgcagcgcgcttttcgtaggctcgacaatcagcccgtctatatttttggacagcaggttttcaaggccccgccgctcactttctgtattgttgttggtgctcgtcagcagcatggaatagccctgttcgcttaaataagattcaattcccctgatgatgctcgggaaaatatagtctgatatgtacgttgtaatgacaccgatcgttttgtttgaatgcatggctgatttcgccgtgcgtgaagcgacaaaggtgcctccgccctgaacgctgtacagcaacccctgcgagaccaaatctccgatcgcctttctgatggtatggcggctgaccccgaactgctgcatcagctcattttccgtaggcagcttttcgtccggctgtatttttccctgattcagccatgaacaaatttcttcttttacttgagcatatttcggtagcatatcaattcctccaaaatgtatacggacaaattccagtataacatagtaagccctttcatcaagctgtaaaaataattgacagattgtgaaaaactgcttattctttatttgtacgtactaattttccttatttttagataaaattctttataagtacgtacaaatgtggcggttctgaagaaaacaaagcaactcaagcgccgcactttgttttgtaagcgtttttattctattattcgcgggagggtaaaattcatgaagaatcacccggcaccaattggctcaaatgtacctgtcactcggcagcattcgaagtggtttgtcattctcatctcatgcgcggccggactgggagggcttttgtacggttatgatacggcggtgatttccggcgccatcggtttcctgaaagatttgtaccgcttaagtccttttatggaagggctcgtgatttcaagtattatgatcggcggtgttttcggcgtcggaatttccggatttttaagtgaccggttcggacggagaaagatattgatggcagcggcgctgttgtttgcggtgtcagcggttgtctctgcgctttctcaaagtgtgtcttccttagtgatcgccagagtcatcggcggtctgggaatcggcatgggctcctcgctttctgtcacgtatattaccgaagccgctccgccggccatacgcggcagtctttcctcactgtatcagctgtttacgatattagggatctccggcacttattttattaaccttgccgtccagcagtccggctcgtatgaatgggggtgcacaccggctggcggtggatgctcgcttacggcatgattccgtccgtcatcttttttatcgtgctgcttatcgtgccggaaagtccgcgctggcttgcgaaagcggggcgccggaatgaagccctcaccgtgctgacgcgcattaatggcgagcagaccgcgaaagaagaaatcaaacaaatcgaaacgtctttacaattagaaaaaatgggttcattgtctcagctgtttaaaccggggctgagaaaagcgcttgtgatcgggattctgctggctttattcaatcaggtcatcggcatgaacgcaattacgtattacgggccggaaattttcaaaatgatgggcttcggacaaaatgcggggtttatcacgacatgcatcgtcggtgtcgttgaagtgattttcaccattatcgcggttcttttagtcgataaggtaggccggaaaaagctgatgggggtcggatctgcctttatggcgctgttcatgatcttaatcggggcatccttttattttcagctggcgagcggtccggctttagtcgtcatcatattgggattcgtcgccgctttctgcgtatcagtcgggccgattacgtggatcatgatttcggaaatctttccgaaccacctccgcgcacgcgccgccggtattgcgacgatattcttatgggggccaactgggcgatcggccagttcgtgccgatgatgatcagcgggttggggctcgcgtacaccttctggatattcgccgtcattaatattctctgtttcttgtttgtcgtgacgatctgccccgagacgaaaaataaatcattagaagaaatagaaaaactctggataaaatgaaagcgttttacggcaaaagtccgctgcggcgggcttttgtctgtcaccttcattccgtttctgtatataatgactgtatcaaggagatactggtaaatcctgcgaagaatgtcgaggaattgacctttaacagttgaattaacaatgtcatcctgttaaaataattaaagaaagcagacataattttttttggctatgatgggacgttttttgtcatagcgggacattttctgtccagtatgaataggaaggaacgtttgagtcatgaaccagttaatacaagctcaaaaaaaattattgcctgatcttttgcttgtgatgcagaaaagatttgaaatcttgcagtatatcaggcttacagaaccgatcggccgcagaagtcttgcagccagtctcggattgaccgagcgcgttctcagaagcgaggttcagttcttaaaagaacaaaatctcatcgatattaaaacaaacggcatgacaatgacggaagagggctattcactgctttcgattctggaagatacgatgaaggatgttttaggattgacgcttttggaaaagacattaaaagagcggctcaatctgaaagacgccattatcgtttccggagacagcgaccaatctccttgggtcaaaaaagaattagggagagcggccgttgcatgtatgaaaaagagattttcaggcaaaaatatcgtcgctgtaaccggcggtacgacaattgaagccgtcgccgatatgatgacgccggattcaaaaaaccgcgagctcctgtttgtgcccgcaagaggcggtttaggcgaagatgtgaaaaaccaggcgaacaccatatgcgcgcatatggcggaaaaggcttcaggcacttaccggcttttgttcgttcccggccagctgtcacaaggcgcctactcatctattattgaagagccttccgtaaaagaggtgcttcacacgattaaatcagcgagtatgctcgttcacggaatcggcgaagctagaacaatggcggagcgaagaaacacgcctttggaagatttgaagaaaatagatgacaatcatgcggtgacagaggcattcggctactactttaatgcggacggagaagtcgttcacaaggtgcattcagtcggaatgcagctcgatgacctcgatgccattcccgacattatcgcggtagcgggcggatcatcaaaagcagaagcaatcgaagcttattttaaaaagcagcgaaacacggttctcgtcacggacgaaggagccgcaaagaagttattaagggataacagtccctcaatataaatatctctcacttatttaaaggaggaaataatcatggcagtaaaagtcggtattaacggttttggtcgtattggacgtaacgtattccgcgcagcattaaacaatcctgaagttgaggtagtagcagttaacgatttaacagacgctaacatgcttgctcatcttttacaatatgattccgtacacggaaaattagatgcagaagttaaagttgacggcagcaaccttgttgttaacggcaaaacaatcgaagtttctgctgagcgcgatcctgcgaaactcagctggggcaaacaaggcgttgaaatcgtagttgaatctactggtttcttcacaaaacgcgcagacgctgcgaaacacttagaagcaggcgcgaaaaaagttatcatctctgcacctgctaacgaagaagatatcacaatcgttatgggtgttaacgaagacaaatacgatgcggctaaccaccatgttatctctaacgcatcttgcacaacaaactgccttgcgccgtttgcaaaagtacttaacgacaaattcggcatcaaacgcggtatgatgacaactgttcactcttacacaaacgatcagcaaattcttgatcttccgcacaaagactaccgtcgtgcgcgtgcagcagctgaaaacatcattcctacatcaactggtgctgctaaagcagtttcccttgttcttcctgaactgaaaggcaaactgaacggcggagctatgcgtgtgccgactccaaacgtttctcttgttgacctagttgctgaacttaacaaagacgtaacggctgaagacgtaaacgcagctcttaaagaagcggctgaaggcgatcttaaaggaatcctcggctacagcgaagagccattagtatccggagactacaacggcaatgctaactcttctacaatcgatgctctttctacaatggttatggaaggcagcatggtaaaagtaatctcttggtacgataacgaaagcggctactctaaccgcgttgttgaccttgcagcttacatcgcaaaacaaggtctttaattcatagctcccggaaagggccggacttggttctttcggacagaaacgctataatgaaagcggacaagggaaggggacggactccctttccctttttccatgagaaccggctttcagaaagcgccggattgctgcagaacgtccgcgttttgaagtttccgcggcactttcgttttctgagccgcctgccctggctcagaagacgatctgccccgtgcccggaagctgcaatctgccccgcggcggaagcatcatgaggcggtttcacgtttcacgtttttcgtgctatgcaaaccattttgaaggaggatctcctaaggcatgaataaaaaaacagtaaaagacatcgacgtaaaaggcaaagtcgtattctgccgcgttgactttaacgttccaatgaaagacggggaagtaacagacgatactcgtatccgagctgcgcttccaacaatcaaacaccttgcagaccaaggcgcgaaagtccttcttgcgagccacttaggccgcccgaaaggcgaagtggttgaggagcttcgtttaactcctgtcgctgcacgcttaggcgaactgctcggaaaagaagtgaaaaaagcggatgaagcttacggcgatgctgtaaaagcacaaatttctgatatgaaggacggagacgttcttgtattggaaaacgtacgtttctaccctggtgaagagaaaaacgatcctgagcttgctaaagcatttgctgagcttgcggatgtatatgtcaatgacgcattcggtgctgcccaccgtgctcacgcatctacagccggaattgccgagcatctgccggcggttgcaggattcctgatggaaaaagagcttgacgttctcggcaaagccgtgacaaatcctgagcgcccgtttacggcaatcatcggcggcgcgaaagtaaaagacaaaatcggcgtaatcgaaagtctgcttgataaagtggacaacctgatcatcggcggaggtcttgcttacacattcgtaaaagcgcttggctatgaagtcggtaaatctcttcttgaagaagataaaatcgaacttgcaaaatcattcatggaccgcgcgaaagaaaaaggcgttaaattctatatgccggaagacgttctcgttgctgatgatttctctaacgatgcaaacgttcaaatcgtgccgatctctgagatcccaagtgatttagaagcgatcgacatcggaacgaaaacccgcgaaacgtacgctgaagttatcaaaaacagcaaacttgtcgtatggaacggacctatgggcgtattcgaaatcgacttgttcgctcaaggcacaaaagcagtggctgaagcattggcagaggcaaacgatacatactctgtcatcggcggaggagactctgcggcagccgttgaaaaattcggccttgctgacaaaatgagccatatctcaacaggcggcggcgcatcccttgaattcatggaaggcaaagagcttccgggtgtagctgcgctgaacgataaataaaaactgctataaggaagtggaacagatgagaaaaccaattatagccggtaactggaaaatgaacaaaacactcggcgaagctgtcagcttcgttgaagaagtgaaatcttccattccagcagcagacaaagcggaagccgttgtttgcgcaccagctcttttcttagaaaagctgacttctgctgttaaaggaactgacctgaaagtcggcgcccaaaacatgcattttgaagaaaacggtgcgttcacaggtgaaatcagcccggtcgctctgaaagaccttggcgtggattactgcgtcatcggccactctgagcgccgtgaaatgttcgctgaaactgatgaaacagttaacaaaaaagcgcatgccgctttcaaacacggcattgtgccgatcatttgcgtaggtgaaacgcttgaagagcgcgaagccggaaaaacaaatgatcttgttgccgatcaagtgaaaaaagggcttgcgggtctttctgaagagcaagttgctgcttccgttattgcgtacgagccaatctgggcaatcggaacaggcaaatcttctacagcgaaagatgcaaacgacgtctgcgcgcatatccgtaaagtcgttgctgaaagcttcagtcaggaaactgctgacaagctccgcattcaatacggcggcagcgtaaaacctgcaaatattaaagaatatatggcagagtccgatattgacggtgctttggtcggcggcgcaagccttgaaccgcagtcattcgttcaattattggaggaaggtcaatatgagtaaaaaaccagctgcactcatcattcttgatgggttcggattacgcaatgaaacagtcggaaacgcagtcgcacaagcgaaaaaaccgaatttcgaccgttattggaaccaataccctcatcagacgctgacggcatcaggcgaagcagtcggactgcctgaaggacagatggggaactctgaagtcggtcatttaaatatcggcgccggacgtattgtgtaccaaagcttaacacgcgtgaacgttgccatccgcgaaggcgaattcgaacgcaatcaaacgttccttgacgccatcaaaaacgcgaaagacaacgacaaagcgctgcacctgttcggccttctttctgacggaggcgtacacagtcacatcaatcatttattcgcgctgctgaaacttgcgaaaagtgaaggactgacgaaggtgtatattcacggtttcctcgacggccgcgatgtaggtccgcaaacggcgaaaacttacattcagcagctgaatgagcagatcgaagaaatcggtgtcggcgaaatcgccagcatttccggacgctactactccatggaccgcgacaaacgctgggaccgtgtggaaaaagcgtaccgcgcaatggcttacggcgaaggcccgtcttaccgcagcgcgatggatgtagtcgacgattcttatgcgaacggcattcatgatgaattcgtcattccgtccgtcatcacaaaagaaaacggtgaacccattgcgaaaattcatgacggcgattctgtgattttctataatttcagaccagaccgcgccatccagatttcaaacacgtttaccaacaaagatttccgcgatttcgaccgcggtgaaaatcatccgaaaaacctgtatttcgtctgcctgactcacttcagtgaatctgttgacggatatgtggcttttaaaccggtaaaccttgacaatacggtcggtgaagtattagcacagcacgggttaaaacagcttcgcattgcagaaactgaaaagtatccgcacgttacgttctttatgagcggcggccgcgaagaagaattcccgggcgaagagcgcatcctcattaactcgccgaaggtcgcgacatatgacctgaagcctgaaatgagcgcgtatgaagtgaaggatgctcttgtaaaagaaatcgcggctgacaagcacgacgcgatcatcctgaactttgcaaaccctgacatggtcggccactccggaatggtcgaaccgacgattaaagcaattgaagcagtggacgaatgcttaggcgaagtggttgacgccattatcgctaaaggcggtcatgccatcattaccgctgatcacggtaatgcggacattctgattacagaaacaggcgaaccgcacactgcccatacgacaaacccagtccctgtcattgtgacgaaagaaggcgtgacgctgcgcgaaggcggaatcctaggcgacctcgcaccaacgttattagaccttctcggtgttgaaaaaccgaaagaaatgaccggaacatctttaattcaaaaataagcgtaaatcaaaaggagagacaaactcatgccatacattgttgatgtttatgcacgcgaagtccttgactcccgcggcaacccgacagttgaagttgaagtatatacagaaacaggagctttcggccgcgcattagtgccaagcggagcttctacaggtgaatacgaagcggttgagcttcgtgacggcgacaaagaccgttaccttggaaaaggcgtgttaactgctgttaacaacgtaaacgaaatcattgctccagagcttctcggctttgacgtaactgaacaaaacgcaatcgatcagcttttaatcgagcttgacggtactgaaaacaaaggcaaactcggtgcgaacgcaatccttggcgtatctatggcttgtgcgcgcgcagctgctgatttcttacagattcctctttaccaataccttggaggattcaactcaaaaacgcttcctgtaccgatgatgaacatcgtaaacggcggagagcatgctgacaacaacgtagacattcaagaattcatgattatgcctgtaggcgcgcctaacttccgtgaagcgcttcgcatgggcgctcaaatcttccacagcctgaaatcagttctttctgctaaaggaatgaacacagctgtaggtgacgaaggcggattcgctccgaaccttggttctaacgaagaagcgcttcaaacaatcgttgaagcaatcgaaaaagccggcttcaaacctggcgaagaagtgaagcttgctatggatgctgcatcttctgagttctacaacaaagaagacggtaaataccatctgtctggcgaaggcgttgtgaaaacatctgctgaaatggttgactggtacgaagaaatggtttctaaatacccaatcatctctatcgaagacggacttgacgagaacgactgggaaggccacaaacttcttacagagcgtcttggcaaaaaagttcagcttgtcggtgacgaccttttcgttacaaacacgaaaaagcttgctgaaggtatcaaaaacggcgtaggcaactctatcctgatcaaagtaaaccaaatcggtacattgactgaaacattcgatgcgatcgaaatggcgaaacgcgcaggctacactgccgttatctctcaccgttccggtgaaactgaagacagcacaatcgctgacatcgctgtggcaactaatgcaggacaaatcaaaacaggtgctccgtcccgtacggaccgtgttgcgaaatacaaccagcttcttcgcatcgaagatcagttggctgaaactgctcaatatcacggtatcaactctttctataacttaaataagtaatgtaatggacgccgggagaatatctcccggcgtttttttatggtcccgggcttttccctcctttttcatcatcttcatttggtcaataatattcatttttcccctttttaaaggaatcagtgttcttcaatcgaaagggaagaggtgttaataagaggagggattatgatgaaattttcatttatgtcagccgcggtggcagcaagcgtcatatggggcgcgtctgccgggccgctgtccgaaactcatgcttattcaactgtgaccgcgccggtttttgatgctgatgaggcattggacactatgcatgatctgagtgaaaccatcggtccgcgggaaaccggaactgcgaaagaaaaggaagcggctgaatacatatcgaatcgtctgcgggctcagggcgccagtgtcaaagtacagtcatttccattgaaaaagtacttttcaggttcagtcacagcgggagatcatgaattcccgctccgctccgctgatcaatccgctgttgaaaaagagctcaaaatagaaggcgggatttttgacggcggctgcggatcacgcaatgacgtaacaggagccgaaggaaagattgcagtgatacgcgaaggaaagatccctgtttctcaaaagatcaaacatgccgaacaagcgggagccaaagcagtcattatttataatcagacaacaaaaccgctcgccgtccgtccgcataccgataaaggaatcacgataccggcggcgggtatgaaaaaagaagacggtgaagcattgcttcaggaaaagaaggcagtcattcaatttaaaaactataaaaaccgcacctcacaaaatattataggaacgcgcaaagcggcacaggccaactcttctgatgctgatattatttatgtcacagcgcattatgacagcgtaaaaggcgcgcccggagcggatgataacgcctcaggcacatctgccgttctggaaatcagcaagcaactcaaacatataccgaaagacaaagagatccgctttatcctgttcggtgcagaagaattatggtctgcgggttcatcttattacgtcagtacactcacgaacaatgaaagaaagcacagccgggccaattttaatgccgatatgattgcgactgactgggaagaagcgagtcaaatgtgtgtcacgactcctgacggcaggaaaaacccgagtgtccggtatgctgaaaaagccgctgaaaaatcccggttggtcaagccaaacctgattcagctcggttactcagaccatgtctctttttatgaagcggggattccgtcggctaactggatttggctcagccccgatacacaggagccggggccctggtaccacaccgaaaatgataatatgaaacacatcagcaaagaacggctagagaaagctggagcactcgtttccgcggcagtaactgaggcaatgaaggaataaaaaacaggcttcggcctgtttttttatattattttctgtatattctatcaattaagggagattttctcactcgttaccagatatataccatttaacaggattttattttacaaataaaagaaaaataaatagataatacctaattcacaaaaggatgtaaaactcatttatcaaattttaacttttgttataattgcgatatcgatcgatatttgttttaaattgtaaaaaacaatactcttttctatctattagggggcgaaaaatgaatactgtcacaaaagaagccagcaaccttggtcaaaaacggctgttacatctgattgaaacgaagcaggcgatagtaggcgtgttaggcatgggatatgtgggatttcctcttgcgctggaatgtgtcgataaaggatacaatgtgatcggatttgacaaaaacagtgaaaaggtttccttgttagccgccggaagcagccatattcaagatatagaggacggcagactgaactcggctttacaaacaaaacgctttcaaatcagtgccgacatgtcgctcatccaaaaatgcgacatcattgtgatatgtgtgccgacacccctgaacaaaaaagacaagatccccgatttaacctacatcgacagtgcagttgacagcatgatcgcttatggaaggcagcatcagcttttaattttagaaagcaccacctatcccggaacaacgaaaaaaaagattgccgacagaatggcatcaagccgcggcatgaaaataggaacagacttttttacggcttattctccggaaagaatcgatccgggcaacaggcaatatgaagtttcagatattcctaaagtagtcggcggaaccacacagacttgcacagaacttgcctcagcgttttacaacaccattgttacaagcattcacccggtcacctcacccgaagtagctgaaacagctaaactcctagagaatacttatcgttatgtcaatatagctcttatcaatgaaatggcgcttaattgccgtgaacttgatattgatatatgggaagtcatctgcgcggcggacacgaagccgttcggctttcaaaaatttatccctggccccggagtcggaggccattgtatcccgattgatcctttttacttcaaatggatcgcgaatgaaaaagggctgcagacaaaattaattgatctggcggacgaaatcaattctaacatgccgatttctgtctctgactatgctttgaaactggcgggcaaagacaaatgcagcatcttaataataggggccgcttataaaaaaaatacaaatgacccgcgtgaatcctcagtgtttacgataatggaagaattgatggacaagggatgcgcgattgattatcatgatccgtttatcagcgagatccgcttgaatgacggaagccgcaaacaatctgtccctttcacaaaagaacaaatcaatcagtacgacgtcatcatcattcatacagatcacgatgtaatcgactacagtattttgaaggatgcctcaccgattatctttgacacaagaaatgtatgcagggaaaaatcagccgacaattgcagagttgtcactttataggagggaacggtcattagtaatcgatttatctcttttcacagacctgatatgacaaacgaagaaatcgcaagcgtaaccgaaacgattcagtcgggctggatttcgaaaggcccgaaggtaatcgattttgaaaaaaagctgggagaatgtattggagccgaacacgtcatcagctgtaattcaggaaccgctgcattacacatggctttattggcgctcggtgtgggagaaggcgatgaagtcatcgtgccgagcttcacgttctgttccagcgtcaatgtcatcctgcacgccggagccgttcctgtgtttgcggatatatgcgagaaaagtctatgtgccgatcctgaagatgtcaggaagaaaataacgccgcgcacaaaagcggtaattgcggttcattttgccggctatccggctgatctggaaaacttgcagtccatttgtaaagaaaacggattgtatctgattgaagacgccgctcatgcgctcggtacaaaatataacggaagcatgatcggcactcacggcgatgccgtgtgcttcagcttttatgccaccaaaaatattacaacgggggaaggcggagccctcgtcatgaaagacgaacaggccgcagaaagagcgaggctgtacggctggcacggcatcacaaaaaatgcctggaaccggtacggtgaaaaaggcagctggagatacgacgtgttactgccgggctttaaatataatatgacggatattcaggccgcgctcggtctggttcaattgaagcgcgcaaacgaaattcaagaaaaacgggcacagatcgctcaattttatgtacgtgaactgtcgggccaatctgacaaagcagcgcttccgctttctgacattccgaacggcataacgcactcatggcatttatttattttgcggatccgagagaacggcggcatggacagagatctgtttattgagaaaatgaaagaaaaacagatcgggctgagcgtgcactttattcccgtgcatatgcatccttactatcaaaaacattttccggccgagctgccggttactgaacgtgttttccgggagatcgtgtcactgcctctttacagccagttatcagatgaggattgcagctatattgtcaagtctataaaagaagttttgactatcagccaggaggtaggatcatgaaacatattgcgattatcggaggagccggttttatcggaagcgaattggcggcattattacaggctaaaggttatcacaccattattgcagaccaaaaggagccggcttttgacactgaataccgccaaacggatatccttgatcggacgtccctccgcgaatcactgcggggagcggatgcggttgtccatttggcggcaatggtcggtgtagacagctgccgaagcaatgaagaagacgtcatacgggttaattttgaaggaacgaaaaatgtcaccgaggtatgcggtgaattgggaatcagaacacttcttttctcatcgagctcagaagtattcggagattcacctgattttccttataccgagacaagcagaaagcttccgaaatcggcttacggaaaagccaaactgcaatcagaggaatatttgagagaacaggcttccgacaagcttcatattcgggtcgtccggtactttaatgtatacgggccgaaacagcgcgaggattttgtcatcaacaagtttttcagcctggccgagaatggctctgagctgcctctttacggggacggcggacaaatacgctgcttcagctacatcagtgatatcgtcaccggaacttatctcgcgctcattcatgaaggagccgtctttgaagactttaatatcgggaacgaccagccgatcacgataaaagaactggctgaaaaagtcaatgtgctctctggcagagagaaggataactatctgtttaaaaagctgggcgaagacggcgtgaggggaaaagacatcgagatttttaaacgggcgccgtcaatcgagaaggcgaaacgtttactcggttacgatccaaaagtaagtctgaatgaaggcctggagatcataaaagatgaaagacaaaagcacaaactttcactttcctgaaaacccggaagtagtcaaatatcccgtttatcccggacagctttccgtcagggaccgtctgcgcgcggtgaagcacttgcttactggcggacaaagcggactgactgaaaaactggaaaaacggtacggaaaaggggttgtgctgacctccagcggcagtgcggcactggtgctcgccttaacttattcgggagccgggccggggaaagaagtgattttctcatccttcagctgcccgaatgtcattgatgccgtattgcaatccggtgcaacgcctgtttttgcgcagctggatgagcatctttctttatcgtttgaggatgtcaaaaaaagagcgacgcggcagacgtgtgcggttatcctcacgcacgtatacggccggagagaaaataccgccatcattgactgggcgaaggaacacggtatttttgtcattgatgatgccgctcaagccatgtttacaaaacaagcggatacatatgccggcggtctgggcgatttcggtgttttaagcttcggcccgtcaaaaccgcttgcgagtatcggaggcggcgcgttaatcgcgccgaaagaatggcttcggcaaaaagcaaatttcccgatggaacagcgcagccaagtggcagctgactatcgaatttatatcagaaatcaaagaatacaggctgttatgaaacggaaacggcatcatcccgtttcatatatttataggaaagcgggcatcatgccttccatgaaagccactaagctcgaagctctgccggataaaccggctgttgtaccggtgcttcgcatgcatccggcaagggaagccattattgaagatcagctttcacttatggatcagcttgtaacagcttcgctccgaaacttacaagcggcgggagaaatctttataaaggcggaagagacgtacggcataaagatgatccagccccaagaaggagaacatctgaattatttaacgattgtattcccccgggatgaagagcggtacgggtgttccgtttatttagctgaaagaggcatccaaacatgctggaactatcttcccctcggacgtattccgatttatgaaacatatgcggcggaagaaggggaagatccgctttggaaaagagttctttctctgccgtttaaacctcctcttcaaaaggagcaagtcagatatatagccgaatccgttttatcatattgtgagcaaaagaataagactgaatagtggtgataacaatgcaaaaaacagcagtatgcacgagccgccaggcatgggatcgggccgctgacatgtatcaggcggggttgtttcaaagctatgattggggaattctcatggaagagcttcccggcacgtcatttcaccctgtcagactgacaacggacggaggacaggtcatctatcttccgctttttgaacagaagggcgtattatccggcaatatgatcggatacggcggcgttatttcagatcgccccatctcatttgaatggcttcaaagtgaaatcgaggccatattcggccggaacatatcccggatgctgctgccgtacggtcagacttcttttacagaagaaatcggggaagggtggacggaaaaggcgacacggattcttacgcttccggacacgtttgacgaactttggacgggcatttccggaaaagcccggacggcagtcagatacgctgaaaaagagaatattgtcaccaggctgatcgggcgacaagaacttgaatcattttacgacctctacaaggagcatacggcggcaatcggcgctgcttatgtgctgagccaaggatttttccaaaaactgcttgacacgtttggggaccggatgttttgggtcggagcatatcaggatgagacgctgatcagcagcagtatttttctctatgaccgctctcatttctattattggcagaatgtaaacagcctggcgggaaaaaaagcgcaggcctcttacttgttgatgcgtgacgctttgcaattcgccatttgccgcaagcttcaatgggctgattttggctattcacacagtaaagaaatcgcaagaccgaaacgatattggggagctgaagaaaaacaatgccgactttttacgaaaccggaatgaaaacaataagcggccatcaatccagttatctgccgtggtacggtttttttgaaaaaatgtataagtcggatctgtttgccattcatgacacggctcaatttgagaaaaaagggtttctgaaccgcaacagaatcaaaacgccgcagggccccagatggctgacggtgcctttgcagatgaaacaatataaagacatagagcttcggcatatgaaaatcgaccagacacaggattggcggaaaaaacattggatggcgattaagatgaactatgcgaaagctccctattttgagcggtaccagcatttttttcaagatgtctatcagagggagtgggaatatctccatgatttgaatatgcacatcattgaatttttccgaaaagagctccgaatcgaaacgccgctctgttatgtctctgagcttgaatgccggaaggagaaaaaaagcgattttgttttagcgctttgtcaggagctgggggcggatcgttattattcaggcagtcagggttccgactatttaatagaaagcgattttgaaagaaacggaattgtcattgagtatcagcagatccggcattttgactatcctcaattattcggggagcatatccctcacctctccatgcttgatatgctgatgaactgcggagcggatacagctgaaatgttagttaaaggagggcaatatgatgaaagtaatggtatttgcagcgcatcccgacgatgaaattatcggcgtcggcggcacgctcgccaaacatgtccgccaaggtgacagcgtgtcggcagtcattatggcggaaggcaagtcatcaagaaaaacggattatgagaagcctgaagagtctgttatgcagcattctgctcaagaaacggaacaagcgctcagcactttgggcatccatgattttgtcaggctgaaccttcctgataacagaatggattcaatggatttgctggatgtcgtgaaggaagcggagaaacaaatcaatcgttttcagcctgacattgtgtatacccagtacggcggtgacattaatattgaccactccgtcgtattcagagcggtcatgaccgcaacccgtccgcttcccggccatacggtaaaacgggtttttgcctatgaaacattgtcttcgacggaatggaattactgtcagaaggatcagtttcatgccaatttcttcgttaatattgaagacgagcttgaaacaaaattgaaatcgatggcgtgttacggctccgagctcagagacttccctcatccccgctctttgcaggcaatcgaacataatgcccgtgtatggggagcaaaatcgggtttttccgctgcggaagcgtttatgcttgtgagaggaacatggtgactgtcctatgattgctcaaattccgtttttcggacttgatccgaagcaaatcgatgagaaatgggtggaagcgggatacggtctggaagcgaatatttttgacggccgctcctttagtgaagcggattatctcaaaacattcaatcagacgctggaatatgcaaaacagcttgatccttcattattgacgctgcatttcccgacagatcatgccgattatgtgcatgaagatcacatcaaaaaacagctttatcactttgcggagctcgctgtgaaatacggcgccaaaggcataaccgttcatgcgaatcaatttatgacggttgaggaatttcaagtgtatgacctggaaggaaaccgtaaaaaaatcattgagtttttcgcagagtttgatgagcagctgaaagggacggacatttggatcggtgtggaaaaccttccgatcatcgggaatctgggagaggattttgatccgattttcatttatcctgaggattttacagagctggttcagctggatctgaagcatgtcggtattacgtgggatctgtgccattgggcgattacctatcagactcacttgtcttccgcgcttatgttcagaaatgaccagctgagatacccggatttctttcagtttctctcgataaaagagagcattaaacattatcacttcagctcatttcgccagcttgcgttcccgcatggcggcgtccgctgttttgagggccgccatccgagtgaagggacgatcgctgaggagctgctgagacgggctgccgatactttgcaggagctttatcggaatcaagataccggcattgtatttgaggtgatggaagaggattatacggaaagacgggaatcatggagaacgctggaatggttcggcggtgtttctgatgccgaggatcaaaaaagggcctgatatgacatatcgaacaccgaactatgcaaagctttggtgtgcgcaggtgttttcttcagcggcggacggtatctggcttattgcactgccgctgttagtgctggaattgaccggcagtaaaattcttgtcggcgttatttcttttatcgaactcgtgccgttgacatttggcgtgctggcgggaccgctgattgatttattccgaaaaaagtcgatcttgtatttgtgcaatacgggccgggccgtcatcatgatcctcttggcggtgctcagcgcgaacgatttattaaccgtgtggatagcaggggtgtgcgccttttgtctatctctgcaatcgatgctgtttgcgccggcgaaagtcgcgatcattccgctgctcgtccgcaaacagcatcttgatcaggcgacatctctgatcaatacgagtgacttgatcggactcatcgtcggaaaactgatcagcggaatcatgattgcggctattccgttcgggctgctgtttgccataaacggaactgctttttttatctccgcggcatttatcgcgttcattcgtatttcagaacagcccaatgaaaaaagcaacggggctgaagatgtaaaagccggctacagaatgctgaaaggaaatgcggcatggctgacatcggtcggatactttttcgtcgtaaatctcgtcattgccggtcttatttcagtaatggggccgattcttgctgtggaacgttttcagcagaactattctgtatggtttgccgtcatgtattcaatgtttcaggcggggatgcttttgggcaatctggccgtatttttcaaatggaatacaaaacgcttgaaccggctgtatccgcggacgttaacggcagcgggactgctcattttggtgctgttttttccgcttcacgggtttgagtgcatcattttcctggtgcttggcatcatcatctcgtatattgatgtgcaaacggtgctgtatttccaaaagacggttccggccgcatatttcggaagggtttttgcactgattttttccattgtcaaaatgggtgaaccgctgtctgccgctgtctacacagggcttctgctgttgatgaatgcggattatatttttgcggcggtcggactgacccttacgatcgtttttgctgttttttcagtcagacaagggagtcaaagaaattcagagaaacaagcggatcaatccgtctgaatggtaaacgaaggtgcgccggtatcagccggcgccctttttatcataaatccaaataaagccgtatcatatccaggcattgaatgccgttttcaaaaatgtcttcatcataatgtctgataaaaaaatcatggtcgacagcctgaatgcggaatccgcatttttgatagagtgacagctgatgaatactggaatttccggtgccgatttcaatcgtgtcagctcccgattgtctcgctttttcaatggcatcttgcaccagctgttttccgaatcccctgttctgcagcgattcttttaccgcgatgtttacgatttctatcgttttaggccttgtttgcaataaaacgtaaacccctgcaagctcgtctgacgtccaagccgtatagcattctcctcttacaagataatcatcgacaatctctttcgacggatcggccagcagcaatagttcatacagcgcttcatccggatccgcggcttttcggatgctcagtttttgcatgtccgtttctcctcctccgttatgatcgacagctatttttcaaaataactccaaaatcattctactttattataaaatatgaaacataggaaaagttatacaagttttgtagattgaataggaggaaagtcatgtttttttgtaagtattgcggccgacagaacaacgaagaggcgcatttctgtaaagaatgcggaaaaccgatcgggaaaggaagccggcttgaacggcaggcggctgtaagagcggctgaacctgcttcacaaatgagaaagccgatccctaaaaaaacgctcttcatatggggcggcatagccgcagcgctgatcttattgattgccgcatataaaaccggagcctggctgacatctgaaaaaaggctcacggatcaattcgaacaggcggttcatgacggggacacgaaaaagctcgcagccctgctcactccttcagacaaaaaactgaagctgaatgagaccaatgtcaaaccgctccttgcatacgcaaagaaacacgatgaactgctggaaacgcttcgcggcaattcatcagaaaaagatgcggtatacgtcaaaaaagagggtaaaacccttcttttgtttgaccattacgaactgaaagtcgatccggtttatttccgcgtcaccagcaattataaaggcgccgatctttatatcaacagcgagaaaacagggacggtcaaaaaagccgatgaaacccaaatcttcggcccgtatgcacccggtgtctacacggcggaagccaagcttaaaaatgacacggttgacgttgtcaaaaagcaagaggcagaggcggccggcagccggaatgttgattttgatctgccgttagacgccgaggatgtgacgttcactccggcagacagcttcaaaagcgcgaaaggcgatctgctgataaacggcaagtccgtccataaagatccgtttacatccgttacatacggtccgctcttaactgacggttccatgacagccgccgtggaggctgattttccttggggaaaaatgaaaactgccgatgttccgatcaacggtactgatatggaattaacgcttatcccggatcaagatacacaacaaacaatcatggacacgattgtcaaaacaacgaagcagtatacaaaagcgatggcagacggaaataccgatcagatgaccgaggctggttccgcctggaaagagcagacgaaagaagtggtatccggcatgaagagttccggcacctttttgaaagatcagtataaagagacaagctttgatctggattcatttgcgatttctcaagagaacggccgctggcaagtaactgttacgggtaaagagcttcatgagtctgcttatttcgacgggaatacgaagcctgatatggaagaggctgagccgagctttcattatgtactctcatatgatacaaaacataaaaaatgggtttttgaaaaagctgatccagcctcagattcttctgggacaaatgtaaaaaaaataaaaaacgaccagccgaaaacctatacatccgcatgggcatcttccaaaggaaatacagcttcaggcagcgtgacaaacgagcaagtcacatcgtttatgactgattacctgacaaatcaatcaagcgccgtcagccttaacaattttgccatcatggcgggcaatttagaagagggaagccctttgtatgctgatcagcagaaactggtcaaaaaactgtacagcgaggggacgactgaagtatttaataaagtgaatgtcaaaagcttttcacagaaaggctctcatctgacgattcatacgtacgaggagttttatattacgaaagccggcggcagtccgaagctcagaacatacaattggacgtatggcggcgttgtcaaagacggaagaatttatttaacatccattcaataaaaaaacccccgcgccaatcaggcggcgggggtttccgtttttaaaagaagaaataattcatgagttctttcatataatgcttgatcgtgaattgaaacgttacgcaaatgatcaaatagatgacgataacagaataaatgatatccgccttagcagtgagctgatgctgatagctcgccagcatgagcggaggcacggcaaacgccgctcctaaaagaccgacagccagaatggtaaagcaaacggttgtatgaagcagcataaaaatgagggcaagaagcaaaatagctgtaaacggaatcaaaaatgctccgaatctggacagcgaatctttaaatgacacctgcgcgccgccggccttcaaagcgataaaaatcaagagatacaggcagaaaacgcataatgcaaaggtaagcgccggtttgatcacaaccgcggtaaaactgacgtcacgaaagccgtctgataagagaatataaaacataatcggcgtcaccaggcagaaaagcaccatgttgatgatgctgctgacaagctgttcgccgcctgtcgttttacatgtttgatacggtctctttaacacatcaagcacgaataaggcaaattgctttgaagcctgcttagccgcggcgccggcctgagcggcctgaccctgtgtttggcctgcgcctccctgcccgggctggggcgcaccgcatttttcacaaaattttccgccatcagtatgatggccgcattgagaacaatacattctaaaactccttttacaagtaatatagggattttgttcaatatttacattataaaagaaaataggacggatgtaacggagttttctaaagatatataaatcaccttctctatgaattgataatagagaaaaagtacccattatggtagaattttattggagctgatagatatcatgtctctcggcgcattgattcagagtgaaaaaggaaattaacgcatgctaaaaaaattgaaaatgctttatcggctgttgaaattcggaaaaggcttatggagatagcaaacagaaaaaaaccgtccttacaaggacggtttttttctgttttccggatcgtccggctgaggttataaaaagcagaccccggggtaaaaatcatgcataagaaacagcggagaacaaaacataactcaataacggcaagtcataaggaggtacgcatgttttcattcatcattcatgtcttcatttcactgtttgcagtctccaatcccatcggaaacgtgccgatttttctttcactgacggaaggatacccggagaaagaacggacagcgatcgcacgcaaggcttccgtgctgtcgtttatcatcttggctgcttttttaattttcggccatctgatctttaaactgttcgacattaacattcatgccttgcgtatcgcgggcggcatttttattttcggcatcgcttataatcttctgaacgcgaagaaatctcatgtacagtctctccatcatgaagagaaaggggagagcaaggagaaagccgatatatccgtgacgcctttgtcgattccgattatcgccggacccggtacgatcgcgacggtgatgagtctgtcggccggccatggcggcatcatccattacatcagcgtgcttatcggcattgcggccgtcatcgcgatgacgttcatcttctttcactattcttctttcatcagcaataagctcgggaaaaccgaaatgaacgtcattacccgactgatggggctgattttggcggtggtggcgatcggcatgatcggcgccggtctgaaaggcatgttcccgatattggtttcctgacttaaaaaagcagcgcccggttatcttcgggggctgcttttttctattttcggcacatgctgaaacacttcttcactctcaaaaaattctatcaaacggctcagccagtcataataatggagccaatccgtcagttcatccaaaagctgacgggctttttcttcaatatcgggactgagattttccgattccagaagctcagtcagctcgcggttcagctttttatagagcattttgtttttgctgaccgcctttgtccaatttgccgtaaacagggagataaacgtctggtaataatcacgctccacgtcgtaaaggtctttgcgaacgcctttttcaaacactttttccgccagattggcatcagtcatttcacggaccacctggctcatcctcgttttgctcatcccggttgcctctgacagctcatttaacgtcatcggcttgcggttcatataaataataccgagcacacgaccaagtgtggccggcattccgaatgtatgcatattctcggcgattctctcaatgagatgctcttcagcatgcccgatgatatcaagagcgtttttttccacggctgatcatcccttcactggcttttcatgctgacaatatatcatattttttacagttgatgaaaaagatgatgcggcaggatatgcgagctatcgggagcgattgtaagaacatccgcattgtcagcgggataacatgaaaaaatacgtatattgtatataatttcaacacattgtaaactttttattttacaaatttcatcttataataaagattatacttttcagaaaaataacggaacccttcggaggtgcacggattgctgagattagaaaatgtatcgaaagtctataaaggcggaaaaaaagctgtcaacagcattgatttaaatatcgaaaaaggcgagtttatttgttttatcgggccgagcggctgcggaaaaacgacgacgatgaaaatgattaacagactgattgagccgtcatccggaaagatttttatcgatggcgaaaacattatggagcaggacccggtggagctgagacggaaaatcggctacgtcattcagcagatcggacttttccctcatatgaccattcagcagaacatttctctcgtgccgaaactgctgaaatggccggaacaaaagcggaaggaacgggcgcgggagcttttgaagctcgtcgatatgggcccggaatatttagaccgctatcctcacgagctgagcgggggacagcagcagagaatcggcgtgctgcgcgcccttgcggcggaaccgcctcttattcttatggatgaaccgttcggagcgcttgacccgattacacgggattcccttcaggaagaattcaaaaaactgcaaagaacattgaataaaacgattgtgtttgtaacccacgatatggatgaagcgattaagctggctgaccggatcgtcattttaaaagcgggagagatcgttcaggccggcactcctgatgacattctccggaatccggctaatgagtttgtcgaagaatttatcggcaaagaacggttattgcaatcaagaccggacattgagcgcgtcgagcagatgatgaacaaaaagcctgtcaccgttacggcggacaaaacactttcgcaggcgatccaagtgatgcgggagcaccgtgtcgattccctgcttgtcgttgatgacctgaatgtgctgcaagggtatgtcgatgtcgagatcattgatcagaaccggaaaaaagcgagcctcgtcggcgacgtgctccgctctgatctgtatacggtcgagcagggtacactgctgcgtgataccgtacgcaaaattttaaagcgcggaatgaaatatgtacccgtcgttgatgaacaaaggcatttagtcggaattgtcacgcgggcgagccttgtcgacatcgtttacgattcaatctggggcgaggaagaccagctggtgacaggctgacaaggggaggaacgcttacaatgaatgaaatgatcaagtttttgcagacgaacggcggagaactgttatataaaacgtgggagcatttatacatttcgatcatcgccgtcatattaggcattgtcgtcgccgttccgctcggagtggcgctgacgagaatgaaaaagggcgcaggcgccgtcatcggcgccgtcaacattgtgcagaccttgccgagtctcgcgatactggcgttttttatcccgctgttaggcgtgggaaaggtgcccgcgatcgtcgcgctgtttttctattcggtgctgccgattctccgaaacacgtataccggcattcaaggcgtaaacaaaaatctgctggaatcgggaaaaggcatcgggatgacggtctgggagcagatcaggcttgtggaactgccgcttgcggttccggtgattatggcgggcatccgcacatccaccatttatctgatcggctgggcgacgcttgcttcctttatcgggggcggcgggctcggagactatatttttatcggcctgaatctctatcagcctgaatatattatcggcggcgccgtgcccgtcaccattttagccattatcattgattatctgctggcggcgacggaacggaaggtgacgccgaaagggctgaaaggactgaaggaagtatcataaggagttggctgttttgaaaagaaaccaaaagagatggatgtgcgcactggcgctgtcagctgctctgcttctgggcggctgttcccttcccggcctgagcggggcttccgatgatacgattaaaatcggggcgcaaagcatgacggaatcagaaattatcgccaatatgctcgcacagatgattgagcacaatacagacttgaatacggcattaattaaaaacctcggatcgaactatgtccagcagcaggcgatgctcggcggtgaaatcgatatcgccgcgacgcgctactcgggaacggatttaacgagcaccctcggcatggaagcggaaaaagacccgaaaaaagcattatctatcgtccagaaggaatttgagaaacgcttccattacaaatggtttgattcttacggatttgagaacacatacgcttttaccgtcacgaaagagcttgcggaaaaagatcatttagacaaagtatccgatattaagaagcatgcggatcaatttaagctcggtgtagacaatgcgtggctgaaaagaaaaggcgacggctataagggcttcaccgacacgtacggttttgaattcggcacaacctatccgatgcagatcggacttgtatacgatgccgtgaaaaacgggaaaatggacgccgtcctcgcttattcaacggacggacggattaaagcgtacgatctgaaaattttaaaagacgacaagcagtttttcccgccgtatgactgttcgccggtcattcccgacagcgtgctgaagcagcatcctgaactgaagggcattgtgaataaactgatcggcaaaatcgatacggaaacgatgcaggaattgaattacgaggtggacggcaagctgaaagaaccgtccgtcgtcgctaaagaatttttggagaaacatcattattttgaataagaaatgaggtggggcaaatggaagtgctgcagcagctcggcacttattattctcaaaacggggcctatgtgcttcaggagttttaccgccattttctcatgtcggtatacggcgttttatttgcggcgatcgtaggtgtcccgctcggcatcttcattgccaggtacagaacattaagcggctgggtattcgcggtgacaaacgtgattcagaccgtgccggcgcttgcgatgcttgcggtgctgatgctcgtcatggggctcggcgccaatacggtgattttgtcgctgtttttatattcgcttcttccgatcatccggaatacgtacacaggaatcgccagcattgaacacgcttatcttgaatcgggaaaagcgatgggcatgaccaaatttcaggtgctccgcatggtggaactgccgcttgcgctttccgtcatcatggcggggctgcggacggcccttgtcatcgcgatcggcattacggcaatcggaacgtttgtcggcgcgggcggactcggtgacatcattgtcaggggctcaaacgccacgaacggaacagcgattattttagccggcgccattccgacagcgctgatggccgttatcgcagatcttgtgatggcatggctggagcgggcgctgagtccggtgagaaagaaaaaacgaaccaaagcgccgaatgcggcatgaaaaaaacgccttgcgggtcagggcgttttttttcttatggcttcggaacatgcttgaatatttcttcgctttcaaaaaactcgatcagacggctgatccagttgtagtaatcaagccaatcctttaattctttcagcagttcgttgattttttcctcagcttcttccggcacgccgttttcaaggacggccgtcagttcgcggttcagttttttatgcatcattttatttttgctgacgaccttgctccatgtggccgtaaacagcgtaataaaggtttggtagtaatcctgctcgacgtcgtataaatctttgcggacgcctttttcaaacactttttccgccagattgacgtcaagcatttcacggaccgcctggctcattctcgttttgctcatgccggtcgcttctgataattcagttaaggtcatcggcttgcggttcatataaataatgcctaaaatgcgccccaccgtcgcgggcattccgaatgtatgcatattttcagcgattcgttctatcaaatgatcttcagcttgttcgattacgtgtaacggatctttctccaacagtttcaatcctttcagtcagcaattccgatgtcaatataccacatttttaaaccggcggaaatgctcttccgagagaatttggcagtaattcggagcaataagaagaactttgccggtcaatacgggtaaatcagtgcttacacaacctttatatataatatggacaaattgtaaactttttaatttacaaagtttaatttataatgggaaacgttcaattgtctgaaaagttaaatttgaatttaacgatttgaacaaatttaatatcggaggtgtgagtgtttgctgacattagaaaatgtctcgaaaacgtataaaggcgggaaaaaagccgtcaacagcatcaacctgaatatcgacaaaggcgaatttatttgttttatcggaccgagcggctgcggcaaaacgacgacgatgaaaatgatcaaccgcttaattgaaccgacagaaggcagaatcctgatagagggccgaaacattatggaacaagacccggtggaactcagaagaagcatcggctatgtcatccagcagatcgggctgtttccgcatatgaccattcagcagaacattacgctcgttccgaagcttttaaagcattctgccgaaaaacggaaggaacgggcgcgggagcttttaaagctcgttgatatggggcctgaatatttagaccgttaccctcatgaactgagcggaggacagcagcagcgaataggtgtattacgggcacttgccgcagagccgccgcttatcttaatggatgaaccgttcggggcgcttgacccgattacgagagattcccttcaggaagaatttaaaaaactgcaaaaaaccttacataaaaccatcgtatttgttacccatgatatggacgaagccatcaagcttgcagacagaatcgtcattctgaaagcgggagaaatcgtccaggccggaacgcctgatgagattctcagatttccggcgaatgaatttgttgaggagtttatcggcaaggaacggctgattcaatcatccagccctgatattgaacgggtggagcagatcatgaatcccgatcccgtgacggtaacacctgagaaaacactgtcagccgccattcagctgatgcgtgccgagcgggtggattcgctgctcgtcattgatgaaaagaacgttctccaaggttatgtcgatgtggagatgattgaccgcaaacgaagacaagcggtaaccgtcgcggaagtgcttgaacgggatctgtacacggtcagaagcggcactctgcttcgcgacgccgtccataaaattttaaaaagaggcgtgaaatttgtgccggtccttgatgaggacggccggctaacgggaatcgtgacaagggcaagcctcgttgacatcgtctatgactccatctggggagaagagaatcagctcgcggtgatgtcatgaggaggcttcaattgatatgaatcagaccgtacaatttttacaggcaaatggaggagagatgctttataaaacatgggagcatctgtacatctcattaatcgccgtcatggcgggcattctcgccgccgttccgctcggcgtcctgctgacgaggatgaaaagaggagccggcgccgtcatcggcatcgtcaacatcattcaaaccttgccgagccttgccattcttgcgttttttattccgcttttaggcgtaggaaaggtcccggccgttgcggcgctgtttttctattccatgctgccgattctcagaaacacgtatacggggattctcggcgtcaatcggcaccttctggaatcgggaaaaggaatcggcatgacggcatgggagcagatcaggcttgtagagctcccgcttgccgccccggtcatcatggcgggcatcaggacgtcttcgatttatttaatcggctgggcgacgctcgcctcctttatcggcggaggcgggctgggagattacatttttatcggcttgaacctttatcagccggagtatattatcgcaggcgccgttccggtcacgatgctggcggccgccgtcgattacatgctggggtgacagaacggaaagtcacgcctgacgggctgaaaagcataaaggacgctttataaggaggaggtctcacatggggaatagatgcaaaaaacggctgctcgcaatcgcctgtctcggcatgctgctccttggcggatgctcgctcccgggattgagcgccgcatcggaggacaccattaaaatcggcgcgcaaagcatgaccgaatcggaaatcatcgcaagcatgctcggacagatgatcgaacatcacagcgggttgaaaacatccgttattaaaaatctcggctccaacgccgtacagcagcaatccttgatcaacggtgatattgatatcgccgcgacgcgctatacaggagacgcgctgaccgggacgcttcgcatggagccggaaaaagacccggacaaagcgctgcggctcgttcagcgtgaatttcaaaacagatatgacatgaaatggtttgattcttacggctttgataatacatacgtctttaccgtttccggacagcttgccagcaagtaccatttagaaacggtatccgatgtcaaaaaagaagcatcccatctgaaattcggcgtagataactattggatgaagctgagaggcaacggatatcaggattttatgaaaacatacggaatgtcatttgaaggcacgtatccaatgcagatcggcctcgtatacgacgcgctgaaaagcagaaagatggatatcgcgctcgcttattccaccgacggaagaatcatcgcttacggactgaaaacgctgaaggatgataagcggttctttcctccgtatgactgttcacccgtcgttccggatcatgtattaaaagagcatcccgaactggagggcgtgatcaataaaatgatcggcgcgattgatacaaagatgatgcagaaaatgaattacgaagttgacggccgattaaaagagccgtccgtcgtggccaaggaatatttagaaaaacatcattactttgaataacggaaaggagatgtgcggatggacacgatgaaagagttgtttacgtattacgctcaaaacggcagctatgttctgtatgagtgctggcggcactttctcatgtcggcgtacggcgtcgttttcgccgccgttttcgccattccggccggaattgtgacagccaggcacgggcgtctcgccggctgggtgtttgctgtggcgaacgtgattcaaaccgttccggcgcttgcgatgctcgccgtcctgatgcttgtcatggggctcggcgccaatacggtcatcacggctttgtttttgtattcactgctgccgattctcagaaatacgcacacgggcattatcaatatcgagcacgcttatctcgagtcgggaaaagcgatgggcatgacgaaataccaaatccttcgtatggtggagctgccgcttgcgctttccgtcattatggcgggtctccgaacggcgctcgtcattgccatcggcatcacagcgatcggcactttcgtcggcgcaggcggtctcggggatatgatcgtcagaggctcgaacgcgacaaacggaaccgccattattctggcgggcgccattccgaccgcgctgatggcggtggccgcagacctgctgatggcgtggctggaacgagccctcagccctgtgaaaaaacaaaaaagaaagctgatcgtacgctcagcctcatgaaaaaaagcattcttccgcgtgaaggatgctttttttgatttcttgattaaattttgataactgcgctgtaaagtcttacatatcaaataacaaagcagaggggtaatcatatgagcaacatcatagaaacgagacagctgcaaaaatcattcggcagacaacaggcagtggctgatgtgtctctatcggttaagcgcaacagtatatacggcctgctcggtccgaacggcgcgggaaaatcgacgactctcaaaatattgaccggcatgctgcagcaaacatccggcgaggttctgttcgagggacatacatggaagcgcgaagatttgaaaagcatcggttccctgattgaagcaccgccgctttacagcaacctgacagccgctgaaaatctgaaagtccgctgcgtgatgctcggactgcctgattcaagaattgcggaggtgctggaaattacgggattaacgggaaccggaaaaaagcgcgccggacaattttccatgggaatgaaacagcgtctcggcatcgcgttggcattattaaaccgtccgtcgctcttaattcttgacgagccgacaaacggattggacccgatggggattcaggatttgcgggaatttatccgctccctgcccggacagggaatgacggtgattttatcaagccacctgttatcagaagtggagcagatcgcagaccatatcggaatcatcagtgacggcgttttaggatatcagggagaaatcagccgggaagacgatctggagcggctgtttctggaggttgtcaaatcaacacgggagaaagcgggacaggaaaatgattcagtacatgcaggcggaacaccttacatctaaaagaacatttatcagaaagctgatcattctgattccgcttctgaacgcggctttttcttttctgctgaatgcggcctattttatgacgggcacgttcaattggtgggcggttattttcatgccgctcatgattgctctaatgtgcggtttatctgttaaaaaagagaaaaaatcagcgaatgaccgcgcggtgtactcattgccggcagatttaaaaagcatatggttctcaaaaataagtttgatcgcgctgtattcactcctgtcgcaaatcgtctttttagtcatcgtgtttttgcttggccttgtgtttccggcaattgctgcgctgcagctgaaaggcgttgaagcaagctcccttttgtggctgacgacgctttgggaaatcccattgtgcttatggattgccagacagttcggatttacggcagtcattctcatcaatatgatcgccgcctttgttttaggcattgtgccggcgtccggttcattgtggtggctgagtccgtggagctggtcagtccggctgatgtcaccgattctcggaatccacccgaacggaattccgcttcccgcaaacagcggcttattaaacggaaacgtgatcattccggctattattctttctattctttcttttatcgcaataagttttgtttccgcagtgtcattttcaaaaggaggaaaccggtcatgaccgtgcttttacgatatatgtgggccgatgtattaaaaatgaagcgcacgccgctcatatggatgcatgctgcggcgccggttttatgcgcgggatttttcctgttatatatgtatggaagggttcaggagtcttatatgctgtacagcgtctttttcagcgcgattgccgttttataccctctgatcatcagtattgtctgcggcatgtctgcctctgtcgaggaacaggcgggccattttcagatgatgctggcggttccgtattctaaaatcgtcagttttgcgggcaagctgcttctgctgctcctattgaatgtgttatcggttggtctcgccatctgtctttatttggcggggttgaaatttgttcttcacatcaatgatctcccgtatcttctctttttaaaaggaggggcgtggctgattgccggcagtattccgctttatatgatgtctttttttgtcggcataaagtacggcatgggaccgtccgggcttttagggggtgcgggattattaatggcggcgctcatgaatacgggacttggcgatatcatctggcgtttttttccgtgggcatggagcgtgaggctttcaggccttgcaggactgctgcattttgacaaagtcaaaaaagagttcctcccttatgtaagatacgatatgagattcggagaaataatgttatatttttctatagtgatattatgtctggccggcctctattggtgcagaagatgggaagggcggcgttcatatgaataaaggcaaggagcgattcggccggtggcaaacattttagcaattgatgatgaaaaagatattctcgttctgatcagaaacattttacagcgtgatcagcatacagtaacgattctggaaaaagcggaagatcagtcattggatttttttcaaggctatgatttgattcttcttgatgtcatgatgcccggaacggacgggattgaactctgccggcggattcggccgctggtggacagcccgatcctgtttttaacggcaaagtctgacgaagaatccattgtgaaaggcctcatgacaggcgctgatgattacatcacaaagccgttcggcgtacaggaattgatggcaagggtaaacgcgcatgtcagaagggaacggcgggaaaagcatcagacgaaacggctgatatcaggcttcatgtttgattttgacaataaagaagtatggatggatgaccggaaactgcctcttacgaaaaacgaatataaaatcgttgaatttctggcacagcataaaaacagaacattctcacgggagcagatttacgaggaagtgtacggcttggacggcgatgcgctctattcaaccattacggagtttatcagaaccatccggaaaaaatgtaaagaacacggggctgatccgatcaaaacggtgtggggtgtcggatacaaatgggaatagcaaaaggaaaatccagcatccgcaaagagcttgtcaaatttaccatcactttgtgtctgagcacgatgggggtggcggcattatgcgtcgccttaaatgccattgccatgaatgccggagcgatcctgcccgcaaactacagcgagcatgaggcggaacagatcaaaccccgcctgaaatcagcggaaaagataacagaagacatgatccccgcaggtatgacatacgccgtttttgataaaaaaacaaagcggatgacaaaaggaacgatgacggaacaagatgcggccaacgccagaaaaaagattcagcatacgccgtattttaattatgctcaaaaaggattcatggtgataaatcggaaagatgaatacggcgttctccaatattcactcaggtcggaatttcagtcgccgctgttaaggcgctatctgccgaattatgaatggacgggtcttacgattctgatcactttgcttcttttgactgtttttatcgtgacgacgcgtttcgccaatcagctgagacggcatttcagcacactcagctccattacggcaagcattcaaaaacagaatttaaatatcaatccaaaaaggtcgcgtataaaagaatttgacgatgtcattgactctctgctgaaaatgaaagacgcgcttcaggcatctctggcggcgcagtgggaggcggagcggataaagaaagaacagatcggcgcgcttgcgcatgatattaaaattccggcaacgatcattaaaggaaatgccgagctgctccagttaacagaacctgatgaggagcaggcggaatatgcgcagtatatcctggatgccggaaacaaaatcgagcattatgtcggacagctgatccagctttccaaagcagaggaggcagttgccgttcatgtcgaatataccgacctcaaagagtggattcaaaacatatatcgtgacgcggcggcgcttgcggggccgaagcagatggatctcgtcctcagcgaacggggaattgaccgaatagaagcgccgatcgatcatgagctgctccacagggcggtcatgaatatcgcggcaaatgccgtcgactatacgccggaaggaggggaaatccgtgtggacgtcctgtgcaccgattccgccctccatcttgccgtatccgacagcggaagcgggttctcgccggaggcgctgaaaagagcgacacagcttttttacacggaggataaaagcagacattcggcggggcatcacggcatggggcttacattcgcccatcacgtcgtacatcttcatcacggcgaattaatacttgaaaatcaggagtctggaggagcccgggcggagattcgaattccgctggaaggcgtcagacaaaaacaagccctgcacgcctgagggcttgtttttctgtataagaaaagcaaaaataaaaacggctgtccgtttgagagatcagccgcttatgcggaaaagagtttatcaggaaggatcaatccatgttgaagaccacttggaaatttcctctaaaataggggctaatgcgcagcctttttccgttaaagaatactcaatgcggacaggcgtttcggggataacatcccgtttgatgacaccttctgtttcaagttctttcagacgttctgacaagactcttccgcttaaattcggaagcgccgcttcaatttcgctaaatcgctgctgtccgttcaataactgaaagacgattagagccacccagcgtttacttaggatgtcgaccgctttttcgaatctggggcacatttctgattggttcatgctttttcacctcgtcttctgctattataccgcaaaatcggagggaacgtacgtctggcgcttgttaagttgaggagaggatcaaaaagaggatgaggaatccggggagcgttttttcgcttcagccgcaataaaatcaaagtatttgctgacgctttcaatatcttcttttgtgaagtgctgccactttttgctgtcaaacagcggcagatgctccgcgcctctgtcaacggcggtctgatagatggcgcagatggattgatagctttcggaggtttcacggatttcctcctgaaatgccttgatgtgtccggcccgcgccattaactcctcgtacgggatttttaatgtgtccgccaattttctgatggtcgcgggtttaggaatgccgcggtgcccgttttcaattctggaaatggtcgccgagctgacgccggaatagacggcaagctgattgacggtaagcttccgggcgcggcgcagctctcttaattgctttccgaatgtgttcaataagatcgcctcacatgtgcaaagtcatgagtcttcatttgttctttttttggcttccgccgataagaacgcaaagtatttatcaagcagaaccaagtcttctttcgacaggtgccgccagttctcccgctccaaaagggataaatcatgcagctcatacgtttcggctttttccagcaaggtgcagcccgtgtcgtacggggctctcgtttcctggacggtctctatgtatcccgccgtctgcatcagttcctcatacgggatttttaacgcatctgcgagctttttaatggttgcaggtttcggcactccgcgtttgccgttttcaatccgcgagattcccgcggcgctgacgcctgaatacgttgccagctgattcactgtcagatgccttttttcccgtaatgtccgcaattgtttcccgaagctttccacagtctctccccctcccgcggtctatttatattctagtatgtttattgactaaagggaatagccaggctggaaaagtattgacaaaagttaacaaaagccgtatcttatgtataagaaagaaagtatttgacagaacggaaggtgaagaaagtggtcgaaaagatacagatcagaagagattatgtgctgcagtatatggtcaataatgactactcgttaaaccagctcgccctggagatcggaatatctcccgccacactgagccgtgtactgaatggagagcgaaggccgggccagctggtcatcggaaaaatgctctattactttgacatgaaatttgaagatcttttttactacgactttgttgacaaaagtcaatgaagatggaagattcaaacgcatttccgtttttctgacatgatgtacaccgatacggcgtgacatgcctttgtttttcatgtaaaatagaagcaatgtaggccagtcagtctggaggtgtatgggatgcacacattattgattaccttattggttatcgtcagtattgcacttattattgtcgtattgcttcaaaccagcaaaagcgccggtttatcgggtgcaatttcaggcggggcggagcagcttttcggaaaacagaaagcaaggggccttgatctgattcttcaccgcacaaccgttgtgctggcagtcttgtttttcgtgttgacgatttcgctagcgtatatcgtataaggcaatgtttgtataaggtctgatttaatatcaggcctttttcttgttgagagacggcgtttgtttctcgcaaaactgtggaaaactaaattgaatgtgcaaaaaaggggttatgagcatgaaaattgtgacaccaaaaccatttacatttaaaggcggagacaaagcggtgcttctgctgcacggatttacgggaaatacggcagacgtcagaatgctcggccgctacttgaatgagcgcggctacacttgtcacgcgcctcaatataaagggcacggcgttccgccggaagagctggtacatacgggacctgaagattggtggaaagacgtcatggacggttatgagtatttacggtctgaaggctatgaaaacattgcggcgtgcggactgtcgcttggcggggttttttcattgaaattgggttacactgtacccataaagggaattgttcctatgtgtgcgccgatgcacattaaaagtgaagaggttatgtacgaaggagttctctcctacgcgcgcaattataaaaaattcgaaggaaaacagccggagcagattgaaaaggaaatgaaggagtttgaaaaaacgccgatgaatacgctcaaatcgctccaggagctgattgccgatgtgcgcaaaaacgtcgacatgatctattccccgacatttgtggttcaggcacggcatgaccatatgattaatacagaaagtgcgaacatcattttcaacgaggtggaaacggacgacaaacagctgaaatggtatgaagaatcaggccatgtcattacactcgataaagaacgggacctcgttcatcaggatgtgtacgaatttttagagaaactcgattggtaacaaacaggaggtcgaataatggaaaaagaagcgtttatggaccgtcttctcgcgtttatgaaggaagaggcgtacaagccccttaccattcaggaactcgaggagatgctgaacatcacggaagccgatgaatttaaagagctggtaaaagcgctggtggcgctcgaggagacgggacagatcgtccgcaccagaagcaaccgctacgggcttccggaaaaaatgaatttagtaaaaggaaaaatttccgcgcatgcgaagggcttcgcgtttctgctgccggaggatacctctttaagcgacgtgtttattccgccgaacgagctgaatacggccatgaacggcgatattgtcatggtgcggctcaattcccagtcaagcggatcgagacaggaaggcacggtcatccgcatcctggaaagaagcatcgaccgcgtcgtgggcacatacacagaaacgaaaagcttcggctttgtcatcccggatgataagaaaatcacgagtgatatttttattccgaaacatgccaataacggcgctgcggaaggccataaagtcgtcgtcaaactgacaagctatcctgaaggcagaatgaacgccgaaggggaaatcgttgaaatactcggccataaaaatgatccgggcatcgatattttatccatcatccataagcacggcctgccgggagattttccggctgaagcgatggagcaggcaacaagcacgcccgataccatcgatgaaaaagacatcaaagaccgccgtgatctccgcgatcaggtcattgtcaccattgacggcgccgatgcgaaggatctggatgacgccgtcaccgtgacaaagcttgataacggcagctacaagctcggcgttcatattgccgacgtcagccattacgttacggagaattccccgattgacaaagaagcgctggaaagagggacaagcgtgtacttggttgaccgggtcattccgatgatcccgcacagactgtctaacggaatctgttctttaaatccgaaggtcgaccggctgacgctttcctgcgaaatgacaatcaaccagcagggacaggtgacggagcacgagatcttccaaagcgtcatcaaaacgacggaaagaatgacctattcagatgtcaaccggatccttacagaagacgacgccgagctgaaagaaagatatgagccgctcgtcccgatgtttaaagacatggaacgtctggcggaaattctccgggcgaaacggatggaccgcggcgccgtggattttgatttcaaagaggcgaaggtgctcgtcgatgaggaaggcgccgtaaaagacgtcgtcatcagagagcgctcagtagcggaaaagctgatcgaagaattcatgcttgtcgcaaacgaaacggtggccgagcacttccattggatgaacgtgccgtttatttaccggattcacgaagagccgaacgccgaaaaactgcaaaagttcttggagttcgtcacgacattcggttatatcgtcaaggggaaagccggagacattcatccgcgcgcgctgcaaagcattcttgatgaagtgcgggaccgtccggaagaaacggtgatttcaacggtcatgctccgttccatgaagcaggcgaaatacgacccgcaaagcctgggccatttcgggctggcgactgaattttatacgcacttcacatcgccgatccgccgatatcctgacttaatcgttcacaggctgatcagaacgtatttgatcaacggacaatcggacgaagcaactcaggaaaagtgggccgaacgccttccggaaatcgctgaccatacgtcaacgatggaacggcgcgccgttgatgccgagcgggaaacggacgatctgaaaaaagcggaatatatgcttgataaaatcggcgaggaatttgacggcatgatcagttccgtcacgaatttcggaatgttcgtcgagctgccgaatacgattgaagggcttgtgcacgtcagctttatgacggatgattattaccgttttgacgagcagcatttcgccatgatcggtgaacgcacgggcaacgtttaccgcatcggagacgaaatcacggtcaaagtcgtcgacgtcaataaagatgagagaaacatcgactttgaaattgtcggcatgaaaggcacccgccgtccgagagaaacaacaggcgaccgcagaaaacgaggcagaccggcgcggaaacgcgtgttaaacagcaataccccggcttcaccgccgaaatcggaggaaaaaggggaatggtttacaaaaccgaagaagaaaaagaaaaaacgcggcttccaaaacgcgccgaaacaaaaacgcaaaaagaagaagtaaatgcgaaaagcaaatagggcataatgctctgtttgctttctttcgcaagccgcattttcattgtcgcggaacgctccatttgctaaaataaagcgtatcgcacacatgaacggtttttgcggagagaggaggataaggcatgccaaaaggatcaggcaaagtattatcgcaaaacaaaaaagcaaaccatgattactttatagaagaaacctatgaaacaggcatcgtgctgcagggaacggagattaagtccatccgcgccggccgcgtaaacatgaaggattcctttgcgaaaatcgagcgcggcgaagtgttcctccacaacatgcacatcagcccgtacgagcagggaaaccgctataaccacgacccgctccggacgagaaagcttttgatgcaccggaaagaaatcaataagctgatcggcctgacgaaagagaaaggctattccctcgtgccgctgaagctgtacttgaaaaacggcttcgccaaagtattaatcggcctcggaaaagggaagaaaacatacgataaacgtgaagatttaaaacgaaaagacgccaaaagagaaatcgaaagagcgttcagagacagacaaaaaggcttctgatgcctgagccttgatgtgatgatatgccctgtgctatactgttcacacatcagattcacaggctgtttattgaagatattcccaattgaatttgcctgtgatcatggtataataacagtacagccagttgagcaagagcttgatagatctcccgtatacccttaacaaggggacgttacggattcgacagggatggatcgagcttgagctgcgagccgagaggcgatctcgttaacacgcacctaaatataactggcaaaactaaaagttttaaccaaaacttagcactagctgcctaataaacgcagcgagctcttcctgacattgcctatgtgtccgtgaagagcacatccaagtaggctacgcttgcgttcccgtctgagaacgtaagaagagactgacagactagctctcggaaggcccgcccgcaggcatgaagacgagtgaaacacgaaatatgcaggctacgctcgtagacgcttaagtaatcgatgtttctggacgtgggttcgactcccaccgtctccatacataacagaggaaccgcagtgccgtcacatgacgcactgcggtttttttatgccgacaaaaaggagtgaatgtaaatggaaatcgtcatcatagacggaaaagatgttacaagcacagaagctttacaccgaatcttaaaagatcaattagatttcccggacttttatggtgaaaatctgaacgccttatgggattgtctgacaggctggatcgaacttccgctgactttggtgtggaagaattttgagatcagtcagaaggaattgggttcggatgctgatgatgtcttggagctgtttcaagaggctcaggcagaattagatggtgaatttttcattcaaattgatcagccgtcagccgggacaacggacaggcactaaaaagtgcgtacttcccctcatccatttttctatccgataatagggacggaaggtttcaggctttcgatttctgtccatatataagaagagacttgcgatagggaggaatggatgatggacttgcagttgaaagggaagacggcgcttgtgacgggatctacgtcaggcatcgggaaggcgattgcggcttcgctgattgcagaaggtgcggccgtgatcattaacggccgccgtgaagaaaaggtgaacgaaacgatccgggaactagagaaacagacgccggatgcccgtctctatccggccgcgtttgatttaggcacggcggaaggatgcggcgcgatttttcagcagtatcctgatgtggatattctcgtcaacaatttaggaatctttgaacctgcggaatactttgatattcctgacgaagagtggctccggtttttcgaggtgaatatcatgagcggcgtgcggctgacacgccggtatgcaaagcggatgattgagcggaaggaaggacgggtgatctttatcgcgagtgaagcggccgtcatgccttctcaggaaatggctcattacagcgctacgaaaacaacgcagctgtcgctgtcacgcagcctggccgagctcacggaagggacgaatgtgacggtgaatacggtcatgcccggctccacgaaaacagagggcgtcgaaacaatgcttgagtcgctttatcccggtgaaaacttgacagcggctgaagcggagagacgatttatgaaggaaaatcgtccgacgtccatcattcagcggttgatccgtccggaagagatcgcccactttgtcgcctttttaagcagcccgctgtcgtctgccattaacggatctgcattgcggatcgacggcggcttggtgcggagcattatataagatgaacataaaaaacccccgcaaagtggcgggggtttttttaatgcggatcacgctgaaaccggctgatgatcctgctgattaaatcttttgttgcacagtcaaagtgctcttctttttggtttgtcaaaagcccgacaggcggtgaaattgttaagttatggatcggaatgaccttcgtgccctcgatcggctctgaatgcgccgtcgccgtaaagattgagacgccgatattttccctgacatagtattgatgagccatgctgctggtcagctccatttttcgatagcggctcccgatggcccgctgcaggtgctgttcaatttgaatccggatcgggcaattggcgggcgtaaaaatcaggcattcattttctaaatcttcgagattaacgcttgctttggcggcaaggggatgtctgtctgacacgatgacattgagcgagtcatggaaaaacggatcgaaataattttccagaatcagctccggctcgccgcataccgcaaaatcaatagcgccctccagcagtttgcggctgcatgtattggcatcatccacgctgacattgaccgacatgtccggataatcatttaagaaaccccgcagcacggcagggaagatcaggcttgccgtcggttcggatatgccgatctgaataaggccggcctggccctgtctgatatcggccagagtatggtcaagcacctcgtattgcgcgagaagctgcccggcccgctcatgaaacagccgccccgcccttgtcagcttcagcttctttccacgttcaaacagctgcgcgcctacatcctgttccagctgtttaatccgcattgaaatcgtcggctgtgagtagttcagaatttctgcagccttataaaagctgcctgactgtacgatggtatgaaacgttttaatggttcgtagttccaacgaaatcccctcccggctgttcattaattttcttgaacctttcctttactttttttgattagtcaaacaaatcagtttgctttatagtataaacaatcaaagcttagtaaacaaattggaattatatattttttgcggggagagtgaccggaatgagtgaagacatatttcgattggctgagaaaaaggatgcgccggagtttttagagctgctgtacagcgcgtttcagccgatccgcaatttggagattgactggccgtcggcgcgggccgacatcgatatggtaacggaaaatattgaaaatcattcagccgtcgtgctcgaacgggatggacggcttctttcaaccattacgatccgttttccgtgggagagtgacacgcctccgtcaaaatatccgtttgtctggtggtttgcgacgcttcctgagctgaaggggcagggcatcggcagcaaacttttgacttatgtggaggaacatgtgctgcgggatacgctgaaggccccggccatcacgctcggcacttcggcgcgcaagcatccctggcttgtagatatgtacagacggaggggatatgaagtgtattttgagcaggagaaagacggagacatcggagttatgatgagaaaggtgctcataccggagcggtttgacgcgtcgctgttaggcacaccgagctgggcgcaatgatcaaaaaacggatcagagccggctgtctgcttctgctgctcggcgtgctggccgggtgcgggcaaggagaaagcgcaaaagcggggagcggcgtgcagaccgtcatcgtcggcacgggaactgattttccgaacattgcttttatggatgaaaaaggcgagctgaccggctatgacattgaagtgatgaaagccattgatgaacagctgccgcaatacaaatttgtctttaagacgatggatttttcgaatctgcttacaagtctcggaaaccggaaaattgacgtgatcgcgcacaatatggcgaaaaacaaggaacgggagaaacgctttttgtatcacaaaatcccgtataactactcgccgatgtacatcacggtgaaggcggataatgacgcggtacgcacgctccgggatttaaaagggaaaaccgtcatcgtcggcgcgacgtcaaacgcggcggattatatgacggcatacaacaaaacccacggcagcccgatacatttgaaatacgccgggcagggcggcaatgatacagcgaaccaaattgagacaggacgcgctgacgccaccgtatccacgccgtttgccgtcgattttcaaaataagacgcacgcgttcaaacaaaagacggtcggtgatgtgctgctcgataccgaggtgtattttatgttcaataaaaacagccaaaccctggcggacgatacggatcgggcgattcaaaggcttgtgagggacggcacattgaaaaggctgagtgaaaaatggctcggcgcggattattcaaaatcaagtttcacgaaataattgaagcagaaaacggggcgatcacatgaaaataagattggcggtcatgtcattaacaattgcggcaacggcggcgttatcagcctgcggcgcgggaggggaggcggcatcaggcaatcagaaaaacgtgaagaacattacggtcggcacggggactcaattttcgaatatttgctttattgatgataaaggcaaattgacgggctacgacgttgagctggtgaaagagcttgacaggcgcctgccggactatcgatttacctttaaaacgatggatttctccaacctgcttgtcagcctcggccagcataaagtcgatatcgtggctcatcaaatggagaaaagcgccgaacgggagaaaaaatttctgttcaatcaagtcgcgtataacaacttcccgctgaaaatcacggtgctccaagataatggggacattcacggcattaataacttgaaaggaaagcgggtcattacaagtccgacgtcaaacggcgcgcttgtcctgaaaaaatggaatgaaaaacacggcagtccttttgaaatcgcctatgccggccaaggttcaaacgatgcggccaatcagctgaaatccggccgcgccgatgcaacgatttcaacgccgtttgctgtcgattttcaaaacaaaacgagcgcgatcaaagaaaaaacggtcggcggggtgctgtcaaatgccaaagtgttctttatgtttaacaaaaatgaacaaacgctgagcgatgacattgataaagcgctcaaggaaatcattgatgacggcacgcttaaaaagctgagtgaaaagtggctcggcgcggattattcaagggagcaatattaagtgaaaaagagagggaccggcaatggaaaaagcgtttgatatcagtatgatcgcgtcctttgtgccgacattgctcgggtatttgcccgtcacgctgtatatattggcggtgtctttgctgttcggctttctattggggctgcttttggcgctgccccgcatctatcgcattcccgttttgaatcagtttgcgaagctgtatatctcttttttcagaggaacgcctatcatggtgcagctgttcattgtattttacggcattccggcgctcacggcgctcgccggaattgatacctctaaaatggaccctttgtatgcggccatcgccacgtatgcgctgagcagcgcggcaagagcggccgaaatcatcaggggaggtgtgaacagcgtcggccgcgggcaggcggaggcggcgttcagcatcgggctgaacagagggcagacattccggcgcatcattctgccgcaggcgctcgtgcaggcctttcccaacatcgggaatatggtgatcggtttcttaaaagatacatcactcgctttttcgatcggggtgatggatatgtcgggcagaggacagaccttgattacatcgagcaatcattctcttgaagtgtatatctcgctgtctgttctgtattacgcggccgcccttttatttgaatgtgtcttcagatgggccgaaaaacgaatcaagaaagatgagacgcgccttgtgacggtttttgacatgagtgcgcacggctgaaaaggagggagaacagtggagctggacattccgtttatcggcactgcgataaaacaaatgttgaaaaccgttccgcttacattggcgatgacgatcattccgattattgccggatttttcatagctctcggcaatatcacggtgcgtatattccgcatcaaatggctgctggcctgctcagcgttttacgtgtcttttttccgcagcaccccggcgattctccatattatgctgatttatttaggggttccgctgattgccgatcaattcagccgcgcgtttcatctcggctggtcagccaatcagattccggtcgccgtgtttgtcatcatggcactgtcattaacggcaggcgcttatatgacggaaattctccgatccgggatcatggccgtcgatacggggcaggcggaggcggcatattcaatcggtctgacgcggggccagttgattcggcgcgtaattctgccgcaggcgttcatgatatcgctgccgaacttcaccaatataggcatcggctttttgcataccacttccatcgcggcaattgttgcagtgcctgaaattacaggaacggcgacgattgcggcatccgataactatgcgtttctggaagcatttatcggggcggccgtgatttattggggattaacgctgattctcgaagctgtaaacagtctggcggaaaaaagagcggccagatatcaaggaggcgcattatgatcgaaatccgaaacattcagaaatattttggcagtcatcacgtgctaaaggggatcaatttaagtgtccggaaaggagaagtcgtgaccatcatcggcccgagcggttccgggaaaaccacttttctgcgctgccttaatttgcttgagcggccggatgagggcgccatttcgctgcacggtgaagtcattaactgcaaaaagcctgccaaaaaagacattctcagactgaggaaacagacagcgatggtttttcagcaatatcatttgttttcgcataaaacggcgattcaaaatgtcatggaaggcctgacggtcgcaaggaaaatgaaaaaaacagacgcgtacgccattgccgagcgggaactggccaaggtggggcttcaggataaactacacgcctatccgaatcaactgtcgggaggacaaaagcaacgggtcgggattgcccgggcgcttgccattcatcctgatgtgatgctgtttgatgaaccgaccgccgccctcgatccggagcttgtcggcgaggtgcttgaggtgatgcttaacattgtgcggaccggcgctaccatgatcattgtcacacatgagatggaattcgccagaagagtgtccgaccgaattgtgtttatggatgaaggagcaatcgtggaacaaggaacgcctgaggaagtttttcacaagacgaaaaaagaaagaacgaagaagttcctccgccgcgtgctgcctgattacggttatgacataaaagagcgcataaaggagcctgtcgtatgattcgtttaagcattttagatcaaagtgtcaccgcggaaaaccaaaccgcagaagaagccttgcggcaaacggtgaaattggctcaggaggccgaacaatacggatatgaccgtttctgggcggcggagcatcataacaatgaagagatagcgggatcagcgccggaaattgttctggggtatcttgccgcaagcacgaaaaaaatccgtctcgcatcaggcggggtgatgctgcagcattacagtccttataaagtggcggagcagttccgggttctgtccgcccttgctcccggccgtgtggcgctcggtgtcggcaaagcgcccggcggatttcagctgtcaaccgatgcgctgcagcgggagcttatccagcccgcccgtttgtttgaagaaaagcttgaggagctgactcatttcattcgaaatgattttccggactcgcaccgctacgcgtcattgcggccgacgccgcatactgagtatgcgcctgacatctttttgctcggcagcagcgcggaaagcgcgatatccgcggccaaactcggcatttccttcgttttcgcctatttcataaacggtgaagaggctgcgttagaaaaagcgcgccacgcctttgacgagcatctgccgaaaggatcgaaggcggaatttcaccttgcgccgatggtatttaccgcgcatacaaaagcagaagcggaaaaacacgtcgtatcgcgtgagtcggtcaaaatcattctcgaagacggcaaaaaggtgaatgtcggttcccgggaacaagcggaagcgtttctggaacaagtcacgcagccatataagctgatcacacaaaagacgggtgtgattgccgggacaaaagaagagaccgccgccgagctgagacgattatccgttcaatacagcattaccgattttgtgattttgtcgcctatcaaaaacgctgaggaaaaacgattgtcttaccggctgttaagcgaagcggtgcagccggccccacaattataggagggatgaacatgagtcatgaagtaaacgtagtggtctggagcaaacagggctgctcctattgcgatgaagtgaaaggatatttgcgggaaaaagccgttgcatacgaaacaattgatgtgacagaacgggacgaattgcgtgacgtgctgcagacgaagtacggcatccgtcatgtccccgtcgttgaaatcggcagcggtgacagccgtgtgtatcaggccgttactcaagtcggcattgatcatgtagaacgggcgcttgccgattacgaggggaaaaagggggagagaaaatgagccggacggatctaattcaattcggagccatgattcacggtgtcggcggcacaacggacggctggcgtcatcccgacgccgatccgacagcaagcacgaatgcggcgttttacaggcaaaaagcgcagactgctgaaagagggctgttcagctttgcttttattgcggacggcttgttcatttctgaaaagtccatcccgcatttcttaaatcggtttgagccgatcactattttatcggcgcttgccgcctctacaacccatcttggtttaatcggcacattttccacctcgttcactgagccgtttaccatcgcaagacagctgatgtctcttgaccatatcagcggcggccgggcgggctggaatctcgtcacctctccgcaggcgggagccgcgcgcaatcacagcaaagaaagtcttcccgaccacagccggcgctacgacatcgctcaagaacatgtggacgtggtgcgcggtctgtggaattcctgggaagaagatgccttcgtccgcaacaaagaaaccgggcagttttttgatcctgacaaactgcatcgcctatatcataaaggcgagtattttcaagtggagggcccgctgaatatcggccggtccaaacagggagagccggtcgttttccaagcggggtcttcagaaaccggccggtcgtttgccgcgcgtaatgccgatgcagtctttacgcactccaattcacttgaggaaacgaaagctttttatgatgatgtgaagaagcgggcggcggattacggccgcgacgcttccaagctgcggatctttccgggaatcagtccgattatagccggttcacaagaagaagcggaagcgaaatatcaggaattcgccgagctgataccgatagagaacgccattaaatatgtggccagattttttgacgattatgatttgagccgttttccgctggatgagccgtttcctgatttgggcgacgtcgggaaaaacgcgtttcaaagcacgacagaccgtatcaaaagagaggctaaagccaggaatcttacgctgcgtcaagtggcgcgcgaagccgcgtttccgcgaacgaactttatcgggacaccggaacgtgtggcatcattaattgaaacatggtttcagcgggaagcggcggacgggtttatcattcactctgacatcccgggcatgcttgaagcctttgtggatcaagtcataccgatccttcagaaaaaggggctgtaccgaaaaagctatccggcggatacattgcgggggaatctcgggttggatattccgatctgcaaaccaaatccgattttgagcagaaactaaatgtttctgctttttctgctgcttgccattcccgtcattacagccttttttaaaaaatatactgatttcgagatattattgttgcgaaaagaattttttgtaactataattattacagaactgatcagtataaaaaaacattcatatttcataataaatgtgtgtgtaatttgaaaacgaaagggctgtttacaatggcaaaagtactttatatcactgctcatcctcatgatgaaaagacatcttacagcatggcgacaggaaaagcgtttatcgattcttataaagaatcaaacccgaatgatgaggttgtacatatcgacctttacaaagagaacattcctcatatcgacgcggatgtattcagcggctggggaaaacttcaatccggcacaggatttgaagagctttctgaaaacgaaaaagcgaaagtcggccgtctgaacgagctgagcgatcaattcgcgtcagctgacaaatacgtattcgtcacaccgctttggaacttctcattcccgcctgttatgaaagcgtaccttgattctgtggctgtagccggaaaatcattcaaatatacagagcaaggcccgatcggcctgttgactgacaaaaaagcgctccacattcaggcgcgcggaggctattactctgaaggcccggcggctgacatggaaatgggccaccgttacatcggcatcatgatgaacttcttcggcgttccttcttttgacggtttaatcgttgaaggccataatgctgaaccgaataaagcacagcaaattaaagaagatgcgattgcccgcgcgaaagaagccggaaaatcattctgatcttaaaaaaaacctccccgccgtacggctgggaggttttttatattaaagggcaatcgtccgtttttgctcgctgcttttcatcgccgcttcaatgacacggatgacatcgatgccttcttttgccgtaacgggaagctgttttccgtttaagatgctgtccgccagcagtttgtagtacgtaaggtaagagccgttctcagaggggattgtttctgtatgccttttttcatccgctgcgattgtcagctctccgaagttgtcagggtcatcggcgccccagctgtcgtcaatcggcttttggccggctgaaagcgcctcttcctgtccgtcctttccgtatttgataaagcttgcattccgtccgtgaatctgatagcgcgggccgtttgccgcattcatagagccggattgaagaatgacctgaagtttgccgtaatggagcgcggccagaaaataatcgacggtttcactgttgtcccgctgtttcatcacatgtgccgtgacggattccggcattccgaaaagcaggagtgtctggtcaataatatgtgaaccgagatcatacagcgttcccgtggcgggtccgcttttttcgcgccatctttcttggacaaccggattgtacagatcgtagttgacttgatatgtatgaatgtcttgaagcgccccgtcccgaatcagcttttgtatcgttaaaaagtcattgtcccagcgccggttgtggtacacgctcagtaagacgcctttatcttcagccgttcttctcagttcctccgcttctgctgaagtcgccgtcatcggtttttccacgacggtgtgttttcccgccaggagacatttcatcgctgattcataatgcattccgctcggtgtcgtaacgatgacgagatcaatgtcaggatcaccggtaatgtcttcaatcgcgcgcacggcttcagcccccggcagatcacgtctgacctcatccgttctggaggtcatgacttttttgatctgataatcatcaaggacgtccaaaagcggcgcatgaaagactttacccgacaaaccatatcccaatatgccaacctgtatcgttttcaatgaatttccccctcttgatatgtgataacattatataccccgcgggtgtactggtaaaacttgtgtgttgaaaattttttacaccggattttcaagtctgtataatgaagataacgaagaaaaaaaccgaggtggaaaatggacaaacataccgagcatcaatcgttaaatcataaaagcgccaaggaaaaagaccagattctgaaccggctgaaacggattgaaggccaagtcaggggcattcagaatatggtggagaacgaacgatactgcgtggatattctcgtgcagatttcagccgtgcaggcggccatgcagaaagtcgcgtttcatctgctggaagatcacgcccatcactgcgtagccggcgccattgagagcggaaacggggagcaggcgattgccgagctgcttgatgttgtgaaaaaaatcgcaaaatcgtaaaataaaatgttttgaaataccctacaggggtatggtaacataaaaaagaaaaaacaagacgtggagggaatcatcatggaacaaaaaacactgcaagtggaaggcatgtcctgtcagcactgcgtaaaagcagtagagaccggagtgggagaactgaacggagtgacggcggttcaggtgaaattggaagccggacaggtggatgtgacgtttgatgagcacaaagtctccgtatcagatataaaagacgcaattgaagatcaagggtatgacgtcgtataaggtttatcgcgctgcgggaacgggcgcggttttcttttatcataattataccctcgtggggtttatgaagagagatgaggacattgagtgaaccgaaagaaatgaccattcaagtggggggcatgacatgcgccgcctgcgcttcaagaattgaaaaagggctgaaacggatggacggcgtcaatgacgcttccgtcaatcttgcgcttgagatctcaaatatttcctatcagcctgacaaaatcgaagctggcgccataaaggataaaattgaaaaactcggctatcacgtcgtgacggaaaaagccgattttcagattgaaggcatgacgtgcgccgcttgcgccaaccggattgaaaagcgcctgaacaaaacagagggcgttgtgagcgcaccggtgaatttcgccctggaaacagtcaccgttgaatacaatccgaaagaggtgacgccgaaagagctgaaagagaccgtggcaaaactcggctaccgattagacgggaagaaagcggttgatggagacggcggattatcccaaaaggagaaagagcagcgaaagcagctgatcaggctcatattttctgccgttctctcctttccgcttttatggtcgatggtcagccatttttcttttacttcttttatctggatgccggatatcctgatgaatccgtggctgcaatttgcgcttgccaccccggtgcagctcgtcatcggctggcctttttatacgggagcgtacaaggcgctgagaaacaaaagcgccaatatggatgttctcgttgcgctcggaacgacggccgcttacgcatacagcctgtacatgacgattgcgtctctcgggcgagacggacatgctgaggggctttattatgaaacgagcgccattttgctgactttgatattgcttggaaagcttttagagatgaaagcaaaaggccgctcatcagaagcgattaaaaagctaatgaagcttcaggcgaagacggcggcggttgagcgggacggcaaagtacaggtgattccgattgacgaggtccggacgggggatatcgtatacgtgaaacctggagaacgcgttcctgtcgatggcgaagtgattgaaggccattccgcgattgatgaatcgatgattacgggagagagcatgcctgtcgataagtctcccggaagcaccgtcacaggggcgacgatcaatgcaaacggctttctcaaaatcagagcggtgaatgtcgggaaagataccgcgcttgcacacattattaaaattgtggaagaagcccaaggatcaaaagcccccattcagcggctcgcggatcacatttccggcattttcgtcccgattgtgctggggctggccgtgctgacttttctcatttggtatgtatgggcggcgccgggacagttttctgaagcgatcggcaaattcatcgccgtgcttgtcattgcctgtccgtgcgcactggggctcgccactccgacgagcattatggcgggctccggccgtgcagctgaattcggcattctctttaaaggcggtgagcatttagaaaagacccagcgtctgacgacaatcgtactggataaaacaggaacggtgacaaacggcagaccggttctgacagatgccgtaccggcagagggaatgaacgaagaggaactcctgcggctggcggcggccgccgaaacgggatcagagcacccgctcggagaagccatcgtgtcaggagccgaaaaacgggggatttccatcccgaaactcacccggtttcaagcccggatcggttccggaatctatgcagaggctgacggcagaacgattctagccggatcaagacggctgatggaatcagagcatattgaacatgaagcgctgcttccgcaaatggcccgcttggaggcggaaggaaaaacggtgatgcttattgcggcagacggcaaagcggcggggcttatcgcagtcgctgataccattaaagaaacatctccggccgcggtgaaacgtctgaatgatatggggcttgacgtcatcatgatgaccggtgacaacaaaaagaccgcggaagccattgcaaaagccgcgggcatcggcagcgtgatcgccgaagtgcttcccgaacaaaaggcggcggaaatttcccggctgcaaaaagaaggccggcgcgtggcgatggtcggtgacggcatcaatgatgctccggcgctggctgtggccgatatcggaatggccatcggcaccggcaccgatatcgcaatggaagcggcggacattacgctgatccgcggagacctgaacggcattgccgacgccatcggcatgagccggctgactatgagaaacatcaagcagaatttaggatgggcattgggctacaacagcatcggcattccgattgcggcagccggctttctggctccgtgggtggcaggcgccgccatggcgttcagctcggtatcggtcgtgcttaatgctttgcgtttacagaaggtgaaaaaagacaaaatcggctgatgccggttttgtcttttttattgacactttattcaaagcctgcatataatagagaaaacacttatatgagtatatgctcatatatataaattcgtttacctgtattgatgttatgggaatcctattacggaaagtagggtgagtcgaaaatgaaagcagccaaaggtgaatttgtattagacggacttgattgcagcaactgtgcaaaaaaaatagaaaacggcgtaaaagccattgacggcatagacggctgtgctgtcaattttgcggcaagcaccatcacggtctcagccggcgggaaaaacgagcaatggatgaaagatgaagtcgcgaaaaaagtaaagtccattgatcctcatgtgaccgttcgttcgaagcacgaagacaaacccggtgaggatgaataccgcaaaaagctgcagctgatgttagtgagattggcggcgggcgccgttttggccgtcatcgcttacttcgcgcacacgggcgccgtccttgagtttctgctcttttttgcttcatatttgatcatcggcggcgatatcgtagccagagcgggaaaaaatattgtccgcggccaggtatttgatgagcattttctgatggcgcttgccacaatcggcgcatttatcattcatcaatatccggaaggcgtcgcggtcatgctgttctaccagatcggtgaattgtttcagggagcggccgtcagccgatccagaaaatcgatcagcgcgttattggacatccgtcctgagtacgccaatgtgaaaacggaaaacggcatggctgccgttcccccgcaggacgtcaaagtgggacaggtcatcatcgtgaatcccggagaacggattccgctggacggaaaggtgctgagcggttcctcgatggttgatacatccgctttaacgggcgaatccgtgccgagaaaagcggagccggggcaagaggtgatggccggatttatgaatcagaacggcgtgcttcatattgaaacctctaaagggtatgaagactctgccgtgtcaaaaatattgaatctggtcgaaaatgcggccggacgcaaagcgaaaacggaaaactttattacgaagtttgccaagtactatacaccggccgttgtcattgttgcggtgcttctcgcctttttaccgccgcttctcgtgccttcagccgcgctatccgactgggtgtaccgcgcgctgattttccttgtgatttcttgtccgtgcgcactcgtcgtctccattccgctcgggtttttcggcggtatcggggctgcgtctaaagcaggggtgctcgtgaaaggcagcaactatttagaagcgctcaatcaggtggcatacgccgtgtttgataaaacgggaaccttaacgaaaggcaatttcgccgttactgatatcaaaccggcggcaggatttacgaatgacagcctgcttcatgcagccgcgcttgcagaagtccattccaatcatccgattgcttcttccatccgcgaagcttacaatcaaccgctcgcggctgaggagattgaagaatatgaagaaatacccggacacggcattcgggtgaaaaccggcggatcaacgattttggccggaaatcaaaaactgctggcaaaagaacaaatcgcttccggcacagctgaaaataacggaaccgtcgtttatgtcgccgtggatcagcagtatgcgggggcaatcgtgatcgccgatgaaatcaaagaggacgccaaacaggccattgccaatttaaaagcgctcggcgtgaagcggacagtgatgctgacgggtgattcaaagcagaccggagaagctgtcggcctcgagctcggtattgatgacgtgtacacagagcttttgccgggtgacaaggtagaccgcgtcgaagaacttgaagcggcgctttcaccgaatgaaaaactgatgtttgtcggcgatgggattaatgatacgcctgtgcttgccagagctgacatcggagctgccatgggggctctcggttctgatgccgccgtcgaagcggccgatgtcgtcctgatgacagaccagccgtcaaaagcagccgaagccatccggattgcacgccgcacacgccggatcgtctggcagaacatcggatttgctttaggcgtaaaaatcatttttctcttgcttggcgcattcggattcgccaccatgtgggaagcggtcttttcagatgtaggcgtcacgctgatcgccgttgccaacgcgatgcgcgtcatgagagtgaaagcggaataattgtcaaagataattcgtttttcagggttttcttaaacaaggttgtcttggtaaaatagagaagcgggccatccggcatccgcttcttttttattttaaaaacaatgaggtgtctgagtgaaaaagaaacaatcgtctgcgaaatttgcggtgattctgacgttaatcgttgtcgttttatttgcggccatcgtaattattaacaaccaaacggaaaaagcgggcgaaacagtcgccgaacagccttccattaaaggacagcccgtgctcggcaaagacagcgcgcctgttacggtagttgaattcggagattacaaatgtccgtcatgcaaagtatttaacagcgatatctttccgaaaatcaaaaaagattttatcgataaaggcgacgtgaaattttcatttgtgaacgtcatgtaccacggaagcggctcgcgtctggcggctcttgcttcagaagaggtgtggaaggaagacccggcatcattctggactttccatgagaagctgtttgaagagcagccgtcaagcgaacaggaatgggtcacgcctgcattgcttgaaaaaacggtcaaaagcaccgcgaaaaaggttgatcctgacaagctgaaggaaaaccttgataaagaaaccttcgcaaaagagctgaaagctgacactgacctgaatgataaattaaacattacggcgacaccgacgatttatgtaaatgacaaggtgattaatgacttctctaaatatgatgagatttcaaaaacgattaagaaagagctgaaaaatgaaaaatagaatcgtgtttttatatgcttcttgggtgatagctcttgctgccatgctcgtcagcctttatttcagcgagatcagaaaattcataccgtgcgagctgtgctggtatcaaagaattctcatgtacccgcttgtcctgattttaggaatcgccaccttccagggtgacacgcgcgtgaaaaaatatgtgctgccgatggccgtcatcggcgcatttatatcgaccatgcattaccttgagcagaaggtgcccggtttcagcggcatcaagccgtgtgtctacggcgtgccttgctcatctgaatatattaactggttcggtttcattaccattcctttcttggcattgacggcatttattctcattattatctgcatgtgttttgtcaaaacggaacgcacggcaaaataaagagcctgctccatgggagcggctctttttctattatttgtaccaagctttgtttgtcgcaatctgtctgttatgggagctgtcccaaatatccacggaataggcataatcataattcatgacgcagcggatgccgctgccttgggcgtcatgctgaagtccgaagttatgggaaaactcgtgctgtgccgctttcgccgtgttggccgttccttgatcaaggttcacgctgaaagccgggccgctcggtttgccgttatatacatacgcgataccgccggcgtcaaaactcgattttgcggtaaaaccgacgacaaaatgataattttgatttctgaagctgctttggagattcgataaaatctgagaactgtttgagccggaagaattccaagcctgcacggcctgtacgacgaaatcaatgttgtgatcacggttaaaagcgacatccgcctgctccacgatctggacgattcgcgtttgccagtcgctgtatttggcgcggtattcagcgtccgccaccgccagcactctgaccttctgggagcccgtgctggctttagttgaggctttatcctgactgacattggcattgaatcgtttcgtgccggcctgcttgccgttctcatccagaatttttgtgtcaaccgtctgttcaacttggaccgggcctttcagatctttaaaatgatcggctttcggaagcgggtccgtatacaccgttttcgccggctccgcatgagtgtgcgaatgcgtatggctttcggctgacggcaggccgggaattaatccggcggccaataaaacaggaaaaacaagtgaactgattttcatctcataaccccctttttgttagagaaagtattcaatgaaacttccaataaaccttccattaaagtataaaataggaaaatattcttgctttcagccgttgcggatgaggttgtcccggatcaggaatcagaatctttcaaaaataaggttgattttaagagaaagcgattataaaatctaatggtcgtcagaaaatttaacaaataaaaaggagcatatggaatggcctgggagctgcttagtgtaatcggcatcattgcgtttgcggtcagcggagcgattgttgcgatggaagaggagtatgatattttaggcgtgtatatcttggggattgtaacggcgttcggcggcggagccatccgaaacctgctgatcggtgttccggtctccgccttgtgggagcaaggcgcgttttttcaaatcgctctcgcatcagttacgattgtctttttgtttccgaagctgctgttaaggcattggagtaaatggggcaacctatccgatgccatcgggctttcggcgtttgccatccaaggcgctttatatgccgtgaaaatgggccatccgctcagtgcggtgattgcggcagcggtcctgaccggcagcgggggcggcatcatacgggatttgctcgcgggcagaaagccgcttgtgctcaaggcggaaatttatgcagtctgggccgcgctcggagggttaatcgtgggcctcggctgggccggggatgccgccggtttgtatgtgctgtttcttgtgcttgtggcatgccgcatctgcagttatgtgttcaggtggcgcctgccgattcgttcctatcatatagaacagtaaaaaaaccgatttcacaaacgaaatcggtttttttgcataacggcttctgataaaaaaagacgcccgatatgataagaaaaagggtatttgaccataatgctgaataatatgttgcatatatgtttgtatgatgaaagccggacttgtcagcttgatgtcggaggtgccgctgatggcaaaacgtgataaagagtggaaagaagagcaggaaagaatcaattttgtcatgaaggaactggaacagaaacaaactcatcttgaagcctcatcgggcggattgaagcaggatattgtcggcctgagaaaaacgttttgggatgatgtcaccgtgaatatggatgatgcccacgaagcggctgagacatttttaagcattaaacagcaggcggaaatgctttcagaacgtgaacggacgcatcggcttcaataccggcagcttcaaaaaatccaaaagctgaaaacctctccttacttcggccgtgtcgattttacggaaaaaggggagtcctcttccgagcggatttatatcgggctgacttctttaatggatgaaaacaacgagcaatttctcatttatgattggcgcgcgcccatctcatctctttactatcaatattccccgggaaaagcccgctatgaagttccggaagaaacgatagagggagacatcacactgaagcggcagtttatcattaaaaacgggacgcttaaagcgatgtttaacacggatatgacgattggtgacgaaatgctgcaagaggtgctgagcggccattccggacagcatatgaaaaacatcgtgtcaaccatccaaaaagaacagaacgaaatcatccgggatgaaaaaagcaaatatctcatcgttcagggagccgccggaagcgggaaaacatccgcggcgcttcagcgggccgcttacttgctgtaccgcgggcgcggggtgcttgatgcccgtcagattgtattgttttccccgaacattttgttcaacagttatgtgtccgccgtattgccggaattgggagaagagaatatggagcaggccacctttcaggaatatatcatccgccggctcggacgaaagtttgattgtgaaagcccgtacgagcagcttgaatattgcctgactgaacaaaataaggacgcactttccgtaaggctcgcagccattgcttacaaagcgtcatcagcttttcaggccatgattgaccgctatgccgggtcgctttcggtctcgggcctgaaatgtaaacagatcagcttccggggagacatcctgatttcaaaagagcggattgaagcctatttttattcgcttgatcagcagctgccgattccgaacagagcggagctgacggcggaatggcttctcgcggaaatcagcgctctcgaaaaaaaggagcgtaagaaggaatgggtcttgcaggagagcgagctgcttgataaggaagactatgctgaggtttatcaaacactcaagaagcaggcggcagatgatgaacctgcatttgacgaccatcagcgcgaacagcgcctgcttggcgccattattgtcggcaaagcctttaaaccgattaagcaggccgtcagacggctcggctttctcgatataaaacggatgtatctccggctgttttcagactggggagctgatgaaaagcccgatcattgggagagcatcggcgctttgaccggaaacgcatttgcagaacggtcgcttccgtatgaagatgccgctccgtatctgtatttgcaggatctgttagaaggaaaaagaaaaaacacacaaatgaagcacgtcttcattgatgaagcgcaggattattccccatttcagctcacgtatattcaaaccatcttcccggcggcaaagatgacggtgctcggtgatgtcagccagtcgatttatgcccataccattacgggcccttcttccctcgccggctgctttcgcaatggtgcagaaaagtatgtcagcctgaagcggacttacagatcgacgcggcagattgttgaatttacgaaagcgctgctggctgacggcgatgacattgagccttttaaccggaacggggaaaaaccgcgtgttttgcggacggatacagaaaatgcgcggcgggaacaattggcggatacaatccgggagctcagacaaaaaggctgggagacggtcgccgtcatctgcaaaacggccgcggaagccaaaaaagtgtttcaggcggtcagcgccgagagcggtgtccgtttaatcaataaagaaaaccagccttttcaaaaaggggtatgcgtcattcccgtttatttggcaaaaggcattgagtttgacgccgtcatcgccgctgacgcctctgctgcccagtacaatagcgaacatgaccgtaagctgttatatacggcctgtacgcgggcgatgcatcatttgaccgtattgtctccgggagaaccctctccttttataaaagaagtgcccgccggcttattcgtataagccctttgctgagtgcaaagggctttttatcattagtaatcttaatcgttgtcatcatgattatatattttacttacatacaaactttcggtaaagtttcaattagaatattattttgacaattcctatagaaataacgtacgttacgtttaattccttgtgaggtggatatcgttgcaacttcaggtcatgaacagtccgtttaatcaggagcaggcagagctccttaaccgccttctgccgaccttgacagaatcacagaaaatctggctgagcggctatttggctgcggcccggtccgaatccggtgaaacagccgcgcccgctgctcaggctcctgctgaaagcccggcagtctcgaaagaagtgaccgtattatacggatcgcaaacgggaaatgcggaaggtcttgcgaaacagacggtaaagacgcttgaggaacggggattccaggtcaccgtcgcgtcgatgaacgattttaagccgaataatctgaaaaaagtaaacaatttactgatcgtggtgagcacacacggagaaggcgatccgccggataacgcgctggcctttcatgactttcttcacggcagacgcgcgccgaagcttgaagagctccgttactccgttttggcgctcggggacagctcgtatgaatttttctgccagaccggcaaagagtttgacgagcgtcttcaagagctcggcggcacccagcttgcgccgcgggttgattgcgatcttgattatgatgagccgttttcggaatggcttgaagcggtcatcggcggtttgaacgaaggagcgggaaatcaaacagccgaagcgcctgccgagacgcccgctctcggtgaatccgtttattccagaacgaacccgtttcgggcggaggttcttgagaacatcaatctgaacggacgcggttcaaataaagaaacacgtcatctcgagctttcgcttgaagggtcgggcctcgcgtatcagcccggagacagcctcggcatctatccggaaaatgatccggcgctcgttgatgagctgatcaatgagctgaaatggaatccggaacaggaagtggcggtgaataaacaaggagagcgccgtccgctgaaagacgcgcttacttctcattttgaaattaccgtcttaacaaagccgcttttgcaaaaggccgcacagtttatggctgatcaaaagctgagtgaacttctggccgaaggaaacgaagagcagctgaaagcatacaccaacggccgtgatctgcttgatctcgtccgggatttcggtccgtgggaagcttccgcggaagactttctttcgatcctgcgtaaaatgccggcccggctctattcgatcgcaagcagtttagaagcgaatccggaagaggtgcatctgacaatcggagcggtcagatatgacgcgcacggcagagaacgcaaaggcgtctgcagcattctttgtgcggaaagactccagccgggagatacgcttccgatttacattcagcacaaccaaaacttcaagctgccggaaaatccggatacaccgatcattatggtcgggccggggacaggcatcgcaccgttccgttcctttatgcaggagcgtgaagaaaccggagctgaagggaaaacatggctgtttttcggggatcagcactttgtcactgattttctgtaccagacggaatggcaaaaatggctgcaaaacggtgttcttacaaaaatggacgtcgctttttcccgggattcggaggaaaaagtatatgtgcagcaccgcatgaaagaacaaagcaaagagctgtatgaatggctgcagcagggagccgccgtatacatctgcggtgatgaacagcatatggcgcatgacgtgcaccaggcgcttctcgatatcattcaggaagaaggcggcatgagccgtgaaaaagcggaaagcttcctggcagacatgcagcagaaaaaacgctatcagcgtgacgtatattgattttggtttgaaaggagcttattcagcatggtgaacaacattttaaaagcgccggaaggccctccaagtgatgttgaggaaattaaagaaaaaagcgattatttgcgcggcacattgaaagaagtcatgctcgaccggatttcagccggcatcccggacgatgacaaccggctgatgaagcatcacggaagctacttgcaggatgaccgcgatctccgtaatgaacgtcaaaaacaaaagcttgaaccggcttatcagttcatgctgcgtgtccggatgccaggcggcgtgtcaactccggaacaatggcttgtcatggatgaactggcgcaaaaatacggaaacaatacattgaagctgacaacgcgtgaaacgttccaaatgcacggaattttaaaatggaacatgaaaaaaacgattcagaaaatcaatgcggcgctgctcgataccattgcggcctgcggagatgtcaaccgaaacgtcatgtgcgcttcaaatccgcaccagtctgaaattcatgcggaagtatacgaatggtcgaagaaattgagcgatgaccttcttccgcgcacgagagcctatcatgaaatctggcttgatgaggaacgtgtggcgggaactcctgacacggaaacggaaccgatgtacgggccgctgtatttgccgaggaaattcaaaatcggaatcgccgtgcctccgtccaatgatatcgatgtcttttctcaagatctcggcttcattgccatcgtggaggaaggccgtcttatcgggttcaacgtggcaatcggcggcggtatgggaatgacgcacggcgatacggccacttatccgcagctttcaaaagtcatcggcttctgcaaaccggagcagctgtatgatgtagcggaaaaaaccattacgattcagcgcgattacggaaaccgttccgtcagaaagaatgccagattcaagtacaccgttgaccgtctcgggctggaaaacgtaaaagccgagctggaaaaccgcctcggctggcagctggatgaagcgaaaccttatcattttgaccataacggcgaccgttacggatgggtgaagggcgtaaaagggaaatggcactttacgatgttcatcgaaggcggccgcgtcacggactatgagaattataagctgatgacgggattgcgtgaaatcgccaaagtccatacgggagatttccgtctcacctctaatcaaaacctgattatcggcaatgtctcgagccagaaaaagaaacaaatcagcgcattaatcgaacaatacggtctgacagacggctggcagcattccgccctccgccgcagttcaatggcttgcgtcgcgcttccgacatgcgggctcgccatggccgaagccgagcggtatctgccgaagctgattgataagattgaagacattgttgacgaaaacgggctccgggatgaagaaatcaccatccgtatgaccgggtgcccgaatggctgcgcccgccatgcactcggcgaaatcggatttatcggaaaggcgcccggaaaatataatatgtatttaggagcggcgtttgacggcagccgtttgagcaaaatgtaccgggaaaatatcggtgaagaggaaattctgaatgagcttcgcaccattctcccgcgctacgcgaaagagcgtgaggaaggcgaacacttcggcgatttcgtcatccgcgccggcatcattaaagcgacgacagacggcacgaattttcacgaataagatgagctcttaaaaccaaggatagagacacactggcggtgcgttctctatcctttactaagcagcataaacgctgctccgcgtcatgaaacagatgacgcagcttgcgaaaaagcctgttttcagagaaaacaggctttttctttttccggaaaaaatgtagctgaaggcaaaaaaagttcgccgtgagcgcgttatgagaaattttaaataaaaacgggtaaaataaaaggagaatggttgcgtgcggaaaatatattgaatctgcccgatcatcggctccggcctttgacaagggcagagaacaggcaataatgatatgatgcagcagatgaaggaggtcagctttggacatatttttagtcgtactcgtacttttaaccattatcgcgatctcaaatatcgtaaatcggtttgtcccctttatcccggtgcctctgattcaggtggcgctcggtatcattgcggcgtcatttccgcaggggcttcattttgaactgaatactgaattgttttttgttttgtttatcgcgccgctgctttttaacgatggaaaacggacgccgcgtgcggaactttggaatttaagagcgccgattctgctgcttgcgctcgggcttgtgtttgccacggtgattgtcggcggttacacgattcattggatgattccgagcattccgctggccgccgcgttcgggctggcggcgattctgtcaccgactgatgttgtcgcggtcagcgcgctgtcagggcgtgtgaagatgccaaaaggcattctgcgtctccttgaaggagaagggctgatgaatgacgcatccggcctggtcgcttttaaatttgcgattgcggctgccgtgacgggcgcattttcgctggcgcaagccgcgttcagtttcgttctgatttcagccggcggtttactcagcggtgtcgtcatttcttttttgattatccgtttccggctgtttatgcggcgcctcggcatgcaggatgtcacgatgcatatgctgattcaaattctgacgccgttcgtcatctatctcgcggctgaagaaatcggcgtttccggcattttagcggttgtggccggcggcatcacgcatgcggtggagcaggaccgtcttgaatcaacgatggtcaaactgcaaatcgtctcttcaagtacgtggaatattattttgttcattctgaacggtcttgttttcgttattttaggtgcgcaaataccggatgtggtttccgtcatctttaatgataccgcgtttaacaatatgatggtcatcgggtacattatcgtcattacgctgacgttaatgattctcaggtttttgtgggtgctgtttttttggaacggcaagtggttttttaacaaggatcagagcatttataaacccggcctgcgctcgaccctgctgatttcggtttcaggcgtcaggggagcggtcacgcttgcgggttccttttccattccttacgtgctctctgacggctcaccgtttcctgaacggaatttgattctctttttagccgcgggcgttattttgtgcacattggtgctggcgacaatcgttctgccgattttgacagataagccggaagacaatgtgaaagaaaagaaagtcaaattgctgacagcgagacggaagctgataaaggctgccttaaccgccattaaagaaaatatgaatgagtcaaacaaaacggcttcttttgcggtcattgccgaatacaatgagaaaatgaaaaatctcaggtttcagcagttcaccgtcaaaaaccgcacgaaaaaagatgagcggaaagtccgcgcccaagggattcaggcagaacaggaagaattgctgcggctgattgagcggggcgacataccggaagaaacggctgacagccttcaggaacggtttgatgaactggaagtgctttatacgaacccgtttaaagtcggcttatctaagaaaaagctgaaacgcctgatgtactggatctttttcggcgaacataaaaaaccggaaatgtcgattttaaatgaagaaggcctcattcgctccacaagggttaaaacggcaaaagcggccattgaaagcctgaaaaaacacatgactgaagaaaataaagatgtgacgcttgccgtcatttccttttacaatcacttgattttcaggctggggcactcgtatcacgaacagagtccgagtcgccgttttgaaaatcaaaaactcgaaatcaaactgcgggccgtgcaggccatccgcaacgaaatccaaacattattcgaagagcgggaaatttcccgcgacatgtcgcatgagcttcgccaatacatcaatgatgtggaagcggccatgcttgacggagatgaataaaaaaagtccggcatctgttcgccggacttttttagattacggacgatggaattcgacgtgatcgccgtcgcggtcaaaccagcctctgaaggcccagttgatccagccgccatctcctttgttggtgaagcttccgtcttcaaacacccaaatgccgtacgtgatgccgtcataaacggcggaaccgtaaaactgaacgccgttaaaatgatcttcatattcctggcttaaattaaacaccatgacattatatttttgtccggaagcgtagaatgaagattccattaagtttttgacgaagccgtcacggttttgcgccgacttaatcgcgtcagcaatcgaattgccgatgccgagcaggtcaacgtcaatgtttaatccgacatcttttgctgagacatctgatgtttgctgagccatgttttgaggggccgggttttcttttgcggatacaaaggacagaggagtcagagacaaagcggcgccaagggcaacggacatcgggatacgcatacgtttcatatgatttcctccttcaattgtgtggtggctacagtagcgatttacccggacagttacctgattaaccgtaatttttgaaaaataggaaaataataacgtcagtggtgcttgggcactaaagatggtttttgtgataacgatgagcgtataattggtttcttacggcggaaatgtgagataataataaccgtttacataatgactagaaaggatggttcaacgtggcaaaaagcttaaaagatactgtaaagcttcataatggcgttgaaatgccgtggttcggccttggcgtcttcaaggtggaaaacggaagcgtagcggcggactccgtcgaagcggcaatcagaaacggctaccgcagcattgatacggcggctatttataaaaatgaagagggtgtcggcgaaggcatcagagctgcgggcgttgccagagaagagctgttcatcacgtcaaaagtgtggaatgaagatcaaggatacgaaacgacacttgacgcgtttgagaaaagccttgagcgcctcggcctcgattacctcgacctttacctgattcactggccgggcaaggataaatataaagacacatggcgcgctcttgaaaagctgtacaaggacggcaaaatccgcgccatcggcgtcagcaacttccaagtgcatcatttagaagaactgctgaaagatgctgaaatcaagccgatggtcaaccagattgaattccacccgcgcctgactcaaaaagaagtaagagatttctgcaaagcgcagggcattcaagtggaagcgtggtctccattgatgcagggacagctcctcgataacgaagtgctgtcacaaattgcggaaaaacataacaaatcggttgctcaagtgattttgcgctgggatcttcagaacgaagtcgttaccattccgaaatcgattaaagagcaccgcatcatagaaaatgccgatatttttgatttcgaactgtcacaggaagaaatggaaaagatcagcgcattgaacaaagacgagcgtgtcggcccgaatccggacgagcttctgttctaagaaaaaacagccctttacggggctgtttttctttacataaatgtctgtgtctgacgttttacgctgaacctgtatgcggctattaataacagggcggcggcgaaggctcccaaaatgatgatgttcagcgtcaggctttggagcgtgcggccgtgctgcaattgatcgaccgtatcaagcacccagcgctgaggcagaaattcggcgattgtctgcactgttttcggcataatattgcccggaaaaaagcagccggcgagcaagcatgtcggtacaacgatcaagttcaaaagcgccgatgccgaagagctgctgttggaaaaaccgacggcaataaaggcgatcccgattgcgcttaatgcaaacagcatcatcaggacgaacagctgccacagcgggaatgacggatgaatatgaaaagcggcgcccataaagagaacggcgaatataatttggacggccatgataatgatattcactgccgcattcgccaatacatactgctttgacgtgatcggcgttgacagaagcctgtagtacgtcctgttttctctctctttaatcatcagttccgtcaggttgccggcggaatagagcataatgataatgagatacccgatgactgagtaagtcatttctttatggttcgaagtatctttcaaaacagcggactccgtttgaatcggagaatgcttgaaatcggcgtacatcgcctgaaaggctttctcgtctccgccggaagatttgccgattgaggcggcgctgttcatataattgtacaaataagagctgacatatccggtgacctgggcgcccttcagcgaggtcatgccgatgtgagacggtttcccgtcttttacgctttgggagaagcctttttcaaacgtaatgagcgcctccatttttcctgaagcgatctttgatgaggcggacgcatccgtttcctccgaaatcttcacatgatccagtccttttaaaaacgtgaccgtatcctgtgccacttctccgccgtcctgatcgagaatgccgatattgagcgtttcggctccgccgttggcattggtcatgaaggagaggaagacgccgatcagcggagccccgatataaagaatgagctgttttttgctttttgtaattcctttgagagtgtgtgcaaacagccaccagaagtttttcatattacagtccctcccgtctttgaaacgtaaatgcggcgatcagcaaaaagagtgccgccaatgctgtatttaaaccgagtgcaggccatgccgctgatacatcatttgcgtaaatgatgttgttaatcgccttattgatccaggataagggcgacagggcggaaatccccctccttcatatttgtaataggcgccgccgataatggacatcacctgcacgatgatgacggtgattaatctggcgctttcgggttttctggtcaaatagctcaggctgagcccgaagctgacggccaaaagaatttcagaaacgagaatcaacagcacaagtcccatgtggctgccccagttcgctttcaagataaatttgctgaaggcgacaacggcaagaatcgtcagaacattcacagccaaaatgccgagcatctttccaagaaagatatcgcttttccggagcggggcggcgatcaggcgatccgcggtgtgccgtattctttccccgcggaataaggagcttgcaaaaatcgaggcgtacagcccgatcatcgtcgtcatggatatcgcgtaaaaatctttcgccttcggttcttttgctttgtgtaaagacgtctgcttcatataatcgcttttgatttgtccggcggaaggtggcttatgcgccttgtaagcggcggcgcctgctttgtattgattggtaaaagcggtcagcatgccttggacgatcgtgccgttgatgccgctccggtcatttgtatagacttgaaaaccggtgttttttacagtgacgaaagcatccgcctgattttcacgaacctcgtttttgccttttgcctccgtgtccgctttttgaaaatagacatgctcttttttggcgtttttcataaactcagtaaagtaatgagaaagtgtcccgtttgattggtccgtatatacgaccttgatgttcccgaccgtcacctctgaatcaaaggcgtttgataatgccgcggtaaaaatcagcatgaagacgatcggaaaagcaagcatgaaaataaaagtccgtctgtcgcggaaactgattttgatttctttcccggcgatgtgcagaatattcatttgcaatcctcctttcaatagggtcagtcgcgcagacttctgcctgtcagcgtgagaaataccgtttctaagtcaggtgcctgttcctgcaaggagcggatttcaatgcctttgtccatgaagtaccggatcaggcggtttaaattgttgacccctgtgtcagagctgattttcacgctgttttcttccagtgcggcggctctgacgccgggcagctcctgaatatcgccgaggctgatgccgtttccggatgacagctcaatcacgacgtccttcgtgtcggtaatgatggaggtcagctgttcttttgtgccttcggcgatgacttttccgtggtcgatgatggcgatgcgtgtgcatatttcttccacttcctccatgtagtggctcgtgtaaatgatcgtgcagcccatttcattgagctttttcactgattgcagaatataatttcttgattgcggatcaatgccgaccgtcggttcatccatgatgatcagtttcggccggtgggcaagggcgcaggcgatattaagccggcgtttcattcccccggaaaaatgcttcggcaaatatttgtgtttatcgctcaagccgacgaatgtcagggcttcctcgacccgttctttcagagccgcccctctcaggccgtacagacctgcgaagaacttcacattttcataggcgtttaattcctcgtaaatcgcgaggtcctgagggacgatgccgatattcattttcgttgctttgctatatttgaaaatatcttttccgagaaacagaatgtctccgcctgaaggttttaaaagacctgagatcatattgatcgtcgtgctttttccggctccgtttgcgccgagaaacccgaaaatctcaccttcttttacggcaagcgacatctggtcaacggcggcataatcaccgaatttcttactcagctgtttgagctccaaaatgttcatgtttccacctctatgtcttatgatgctcttattataaaaaaaagaatgaacggccgttagtgcagctgttcattcctttgacatgagaatcttcatatttttcacatgaaaacattcacttattcaaccggaagcaatgtcgtgacggaaaaaccggccgtgccgtcaaaaataacggttccgtgcaggacggccgcccgttcttccataccgagcatgccgaggccttttttaaagcggacggcgccgtttccgttatctttcacttccgctttcacggctttattcagcacatggatatcaatgaaaatctgcgtggcatcggcgtatttcatcgcattggttaaagcttcggttacgttttcctgaatgactctccaatgcatttgcgtcagcctgtccaaatcgccttgatgcgtaaacggaaccggcatcccgtttttggccgaaaattcatcaataaacgttcttaatctgtgaatgcccatttgttcagcgggcggtttcatatttttcagcgttatgcggatatcctctatgccctctttggaaatggtaatggcgttttggagcagttcagccgctttgtccggatgggagccgagcatccgcttcgccgcttccatctgaatgagcgcgccggtcatcgaatggccgattttgtcatggatggcttgggacaatctgtttctttcctcgagtttgccggtgtactccgattgtttgatatattctgtgctgctgtgcagctgtttcgtcagtttttcaatgcttgagcgcatgctgtccgactgttcttcatatttcttcagccgattgccggaccgggcggccaaaacgaaaatcgccagacagaacaaggttatgacgatataagtcggaaggtcgccgtacgggataaataaaaacggcaaaaacacgagcaggcagaacacatagcggtgaaccggatattcggcaagaaccgcaaaaatggcgggcggcaaaagaaacagaaacgccggatggcctaaggcggaaagccaagcggtcaatgccagcgtcatgagggtgatcccgcgcctccaagcgggcggcctgatcatgcagaccgcgatgcccaaagacagataaagcagcagaaataagacggcgtacggcgtgtaagggcggtctaccgatacgaacaaaaaagccgtataaaaaatagcgatcagtctgctcatcagcatccaaaaatccataccgttcaacgcccgttatccaccttcccggtgatataaaaaatggcgatctgcgttctgtgctcaagccccgttttccctaaaatagatgaaatataattggccgtcgtcccttcagaaatgaaaagctgttttgaaatttccctgttcgagaatcctttcgcaataagcgacatgatgctgagctctctttcagtaaactggctttcatcaatctgatgcgcggcttccgccggccggaaaaggctgtcttttattttgtccagcacggtgtcctgaagaatgctgtgcccgttgaaaacgcttttgatcgcatcgcggatccgttccggttcggtgttttttaataaatatcctttcgcgccgtttttaattgcttctaaaatatactcatcgtcgtcaaatgtcgtcaggatcatcggcttcgtatccgtttcctcagcgatccgttttgcggcttcgacgccgttcatcaccggcatgcggacgtccagcaaggcgatatcgacggggttgtgcttacaatactctgccgcctcgagtccgttttccaacgttgctgatacagtaaattcctcatatgtatgcaaaatgattttcattccttctctgatgaaagaattatcatccgcgataatgacattaatcttcatagccgcaccctttgtgtgtttttgtttcattatataccatccgattttaaatcaaaaagcctcccggcgaaaggtgcgcggaaggcagatcggtcaagcgggctttttcaattggatgaaaaacagcatcagaaaagaaatgatcacaatacagatcacccacacccaggcgagtgtttcattgccggagtccatcgcgacgtaaatcgccgtcggcagcgtttgggtgacgccgggaatatttcccgcaaacattaaagtcgccccgaattcacctagcgcccttgcaatactgagaatgcttccggtcaagagggagggaaaggcaagcgggacggaaatacgggtgaacacctgccacctgccggctccgtctactttcgccgctccctcgatgtcagcatcaaccgcggcgaagccggttttagcggactgatacataagcgggaaggcgacaatggccgaagcgatcaccgcggccgaccacgtgaaaatgacgggctggtgaaaaatccgctcaatcgcccggccgataaagctgtgtttcccgaaaatgataatgagaatgaagccgacaacggtaggcggaagaacgagcgggagcataaacagggtctccacagccgtttttccgggaaatcgcgctttcgccatccaggcgccggcaagcgttccgagaatgatgacggcgatgcccgacgccaaagccacctcaaatgacagtacgacgggagtgaaaaactccgaagccgtaatgttacttggcagtaaatccatatttcttaaacactttcatcgcttcatctgactgcagatactgataaaacgcttctgcttctttacggtgctttgtatccttgacgatgccgacaggatacacgatcggatcgtgcgttttcgccggtgcttcatcggtgattttcacctttttcgaaatcagcgcgtctgttttatagacaagcccggcatcgacatttccggtttcaacataagaaagcacctggcggacgtcttttgcatagacggctttatcttttaccttgtcccacagggataatgccgtcagtgactgtttggcgtattgtccggccggaacggattcaggcgtgccgagcgcgattttttccgtgctgtcttttttcaggtcattcagatgtgtcaggtgtgcgctgtttttctcaggcacgatcatgacgagatcatttttcaaaagatccgtgctgtcctttttgtcgatatctccgtcatgaacgagcttttcgaatttatcttcggctgccgagaagaataaatcagctcccgcgccttgtgaaatttgtttttgcaatgtgcctgatgatccgaagttgtcttgaatggttacgtttgaatgtgatttttcgtagttggtctggatttcttcaagtgcatcctgagcgctggctgctgcagaaacggtcagcgtgacgttttcgttttgtccgcctttggacgattgtccggatgagcagcccgcagttgcgaggaaaacggccatagccgcagttgtgagtagtgtcgctttctttttcaacattgtgcaccccttatagctaaatatcattagatcaaactaattataacgcaattgtacgtgatggtgcggttttttttcaatatctgaacagttataataaaaacggagcgtgataatatgacagaagccacttcctatacaatagaagaagttgcgggccttttgaaggtctccaaactgacagtatatgatttgataaaaaaaggactcattccggcgtacagggtcggaagacagatgagggtcgatgaagaggacttaaaacaatataaagcaaacatgagaatgtcaaaaaagccatccgcagcagaagcgcctgacccgtcacgcgggcgggagccggaaaaaaggcagtctgttatcatcagcgggcaggatgtgtcgatggacctcctcagcaaacagctggaacaaacaatacaggcggctccgctccgcaagtacagcggcagtttgaacagcctgatcgagatgtaccgcggggcttgtgacatcgtcagtctgcatttatacgatggggagacggggcagtataacatcccgtatgtgaagcgcattctttcaggggagccgtttgcgctttttcatgtcgtgctgcggcaggccggattatatgtgaaaaagggcaatccgctgaacattcagggctttcaggacatgagccgaaaggatgtccgcatcgtcaatcgcgaaaaaggatcaggcgcgagggtgctgctggatgaacagctcagatcattcggcatcacgccgtctgatgtcgccggatatcatgacattgtcacggatcatctgtcagcggcttcacaagtatcaagcggaaaggcggatatcggagtcgggtcgctgcatgcggcgcatatggcaggcacggactttatcccggtgatcagtgagcagtacgatgtggtcgtcttaaaacaaaaccgggagcttgttcaaagcgtgcgggacattcttaattctgaggaattcaagtctcagctttctcaattatccggatatgatacgaaaatgacaggacggctcatatatgaaacatgaaaaatccctccatataacggagggatttttttattgcttataaaaccgcagcaggtcgccgtttaatattttatcggaaagcatcagctcttgttccgctttttctttctcatcgctgcacgcgctcatgtcagaaagcggttcacccgttttacggctgtaacacgtatttttcgtataaatatggtcatccgtgataaagctgccgtttctcagcaccgcaaacggagtccgctctccggaaaacagatcattgccgaactgaatgctgcctttcgtttcaatgccgagcaggtgaagcagcgtcggccttacatcaacctgtcccgcggccgaagcaatcgtttccggcgcacggtcggtcaccccgggaatatgaatgataaacggcacgcgctgaagctgaaccgtatcaaacggagtgatttcctctttccctaagaattcggcaagtccttgattatgggcttcggatataccgtaatgatctcccatcaggacgatcatcgcgttgtcatacagcccttcttttttcagcttcttgaaaaagtgtttcagagcctcatcttcatagcggaccgtcgtcacatagcggtttaataactcgctgcttgtgtccggttcctcaatgagctgatcctgttgatcaatttcaaaagggaaatggttggtcaaagtcagcaggcttgcgtaaaacggctgcggaagcttctttaatttttccgctgactgttcgagaaactccttatccttcaggccccagcctgttgaattttcctgtgtcaccttaaattcatccgcgtcgaaaaaacggtcgattccgaatgccccgtacatctcatcccggttccaaaaggctttatgattggcatgcagaacggctgaatagtattgacggtcttttaacatatggtacatcgtattgaaccggtggccgctttttgtgaaaaaaacggcgccgcttgaagacggatacagcgaattcgcagtaatgaattctgaatctgatgtttttccctgttcagtctgctgataaaaatgagtgaagtcataacttttttttcgcagtttgtttaaaaacggggtaatctcccgtccgctgacccgctcatccattacaaaacgctgtgttgattcgagcgtaacaaagatcacattgcgcccctttgcaagcccgaattttgaatcggacggcctgctgtagccggcttgagtgtaattcgcgaccgccgcaaggctgtcttcatcggcaaacgctttagcccctgcattcagcgtctgcgaaatggtgtcatacaaatgaaagtggaacaggccgattccttttacgagcgcttcacgatcaaaagggtgcttgaacagcttcggctgctcggcctcagacagcgcaaggttgcacagcatgaggccggctgatgcccacgcatacgctttaacggtacgggcgcccgcttttcctttatcggctttatgcctttttccaagataaaacaaaatcgcaatatccaaaaataaagcgatataaagcgggtgaaacagctcttggacgctgcttcccatatcacccatattgcttgcctgaaacaaaaccggtatggtgataaaatcaatataaaacccgtaaaacaccgtattcgcgattaaaattcccgtcagcatcacatttgccgaaagcagaaagatccgctgttttttttccgtcagcaagagggcgatgccgaacagcggcacaatgaagctcagcggattaataaggagcagacattcctcaagaaccgaattgttctgcagaccgaaaccgagcttatacacggcataggttttcatccacatgaacaggatggacaggcataaaaaccgatgattgctgaaaaaggttttcttcatatgtatgactcctcaccctaaaagcgaaaagacgctttttgtttaagagatgcggccgtgaaccagttcgtataaataatagcaggatacaatcgttaagccggccagcacaagctgctccgaaaagctccccgttctcatataaaggggaagacggaagcggatggcggacggaaacagcagtttaatgccgttgacggtccatgcgtcaagtacaagatggcttgccattccgatcatcagtccggcggaaatgctcggattcggaatataggttgccgtaatgaaaaacataataagcataaacagcaggctgtgtgtaaacgttctgtgcccgaacaccgtgcttacgactttggacagaacgggcagcgtcctgccgattttgcttttcgtatggcatatgtcgggaatcagcgccccgagggcacccgctgaggtcataaggaccggatcatacccgtaataatacgcaattgcggaacaagaagcgatgcctcccatgatgtgtgtttttcctgtcatttttcgcttctcctttttatttttgccaaaatcccctgaattacaaatatatcaagagaatgcatgtttgatcaacaaactttacctgttccgccaaaaggaaggagacgcggattccgcatattctgccgcggaaaaagacacattataggtgtacctatatttgataaagaggtgatacagatggctttctttaacaaagaaaaaggaaaaaacagcgataaaaacaaaaacgtcattcaaggcgcgcttgacgacgccagtgcagctctgaaagacgatccgcttcaagaagctgttcaaaagaaaaaaaacaaccgctgaccatataagacgggtagggcgaacgctctatccgttttccatctaatatttccctttgacagatctttttatctctgataacctctgagtagaattgaatgataaaaatcctcactctttctcggtgaggtagaggttgcgcttgatgatgagtcgcacatgccaggctgataaggggccgcaaaacatgtgttaaaggcatcagcgccgaagtgtaaagaaagccgatccttctttatgctgggactgtatctgaataagtgcaggactgccgcgtgctttttcgcggagggctatccggagatcaagggtgtgtgtgtttctttaagcatggacttttgttcaggctttttttgcgtgtaaatatggtctcggggtctggtccgtacgaatgaacaaccaggaggtacaggaatggaacagacgaaaaaatggggtttttggttattaacggcgtttgtcgtaggaaatatggtaggctcgggcatcttttcgctcccgagtacgctcgcaaaaatcgcgagcccgttcggcgccacatcggcatggcttttaacgggagccggtgtgttaatgatcgcgctggtcttcggccacttatccatccgcaagcctgagctgacggcggggccgcaaagctatgcgcgtgcgctgttcagcgatcggaaaaaagggaatgctgcgggcttcacgatggtgtggggctactgggtggcgagctggatcagcaacgtggcgatcatcacgagccttgccggatatttaacatcatttttcccgattttaacggataagcgtgaaatgttttcgatcggcggtcaggcggttacgctcggccagctgctgacgtttgccgtatgtacggttttattatggggcactcacacgatcctcgtcaccagcattaacggtgcgagtaaattaaatttcgtcacgacgttttcaaaagtattaggatttatcttctttatcattgcaggtttgtttgtatttcaaacgtcgtttttcgatcatttttattttcctgttcaaacaggtcctcacacggttgagggaatcggcggacagatccacaatgcggcgatttcaacattatgggcgttcgtcggaattgaatcggcagtcattttatccgggcgcgcccgttcgcagcgcgacgtgaaacgcgccaccattaccggattattgatcgcgcttggcatctatatcatcgtgacattgattacgatgggcgtgcttccgcatggtaagcttgtcggctcggaaaaaccgtttgttgacgtattgtacgcgatcgtcggcagcgcgggaagcgtcatcatggcgattctggcaattttgtgtctgttcggaacgatgctcggctggattcttctcggttctgaagttccgtatcaagcggcgaaatcaggagactttcccgctgcttttgcaaaaacgaataaacagggaagcccggttgtgtcgttaatcgtaacgaacgtaatgtcacagatctttatcttttcggttatttcccggacgatcagtgacgcgtttacgtttttaacgacggcggcgacgctcgcttatctgattccgtatctcgtgtcagcgttttacagcctgaagctcatttttacgggtgaaacgtatgacgagataaagggttcaagagtaagagacggtatcatcgccatccttgcctgcatttattctttttacgtcattattaccggaacggccgatttaacgacctttattctcggtatcgggctgtttttcgtcggtttgctgttatatcctttcgtctcaaagaaatttgcaaacaacagaccatcggtatgacaaaaagacatctcacgtctgtgagatgtctttttttgtttgcaacagcggattactttttgacggcgtgtatataatgaatggtctcaaatgcggttaaatggtcagtgcgtccgctgaaaaaacggtcattgacgtccgccggagatacatgttcataaataagcagacctgatgattctaatattttttcgatttctttataactgaaacacgataacatcggttctccgcctgctgcagccattttcaccatgttttccactctgtttgacagtcctctttcttcaaagagcgactcatctgcataatcaaacacgatagagcttcccggcgggacttcggcaaataattgtgtgagcaggcgggcgagatgctctttcgtaaggtagtatgacacaccgagcaggctgaaaaaggttttttggcgtgaaaaaccttcctgatacagacggctgaaagaaagcgaagcggcgaagtccatcggtacaaaatgaagatgatgggaaatgtcgagattcagatgtttcaatctgtttattttgtcttcctgtgaagcgggatgatcaatttcaaatatgtctaagacgtttgtcatctcaggatgcctgaaacagaaagtatcgagccccgcgccaaggataacatactgtttggccccgagcttcacttcattcaaaagcacttcttcacaatatgcggcacgggctaacggtgtaggagacagctgtacttgagtcacccattttaagatgtcatccggttggccttgaagcctctgtgccatgtctttactgaaaaatgatataccttgaatcagatgatcgcggatgtccgaatgctctttttcggaaatcagatcttgtgccataaaatcatcaaatatcaccggggtgtcgtatttactgtggtacgcccttccgaaagcggacagcagggaagtcatactcgccttgttttctttcatataaagatcctccgttatttacatcaatctccggccgggagaatcttattatacatgttaatccaaaaatgtaaattataacataaataaatttttttgtcaagttttaagcgtaataaaaagccgctgtgacagcggcttcggggttacttcgttaagctttttgtgatgtagtcgagctggccttcaagtgagatcgggtctgagaaatagaagccgatcggatcaatgcggtagacatggttttgtttgacggcatcgaggttcttccagattgagctgtcaagcacgcctttgtcgtcaccgccggcctgccatggccccataaagatgtagtctcccgcgaagtcaggcagtttctcgagtgaaatgctggcgtagcccggcccttgattaatggctttttcctgcgtcagttttgtggccttcagcccgagtttgtcataaatgatgcttccgccgcggccgaagtctttaccgaatacatagatgtcttttccgtttgtctgcatgatggagatggtttttgagccgaccgctttttgaacctttgttttagcggcagcggttttcttatcccattcagccagccatttgtctgctttatcttcagtgcctgtcattttcgcaaactctttgaattgatcaatgttgctgagcttgtcatatttaatggcgatggtcggcgcgattttttccagtttttcaatatcggcgccttgtgtcgtccagacaacgattaaatccggctttaagtcaatgattttttcaacggacgtgccgtcgccgatgtttgtgacaccttttgttttccctttgtaataagggtttttaaatacgttttgcggcgcgccgacaacattgatgccgagctgtttaaagtcgccgtagtagccgtcagccatgacgacgacccgtttcgggtgcttcggaattttaatattgccgttttcggctttatacgtgatggtttcttctttttcagaagaaccttttgtgtctgaagaattgccgcatgcggccaaagcggcgaagagcagcacggcaatcagcgctgcgccgattttcttgtatgtatggaacatctgacattccttctttcataaaaattagtgataaagagaatcattatcagtgtgattatatcactgctttcatagagaagcacgctctttttaaagaaaaactttctttttttatatgaaattaggtctattaaaagagaagataaaagtgctatactgaaacaagtcattgataatcattatcattaccattcttgttttgagaaaggaagaacgagtgttgggtctattgaaaaagaaacagacaatgacggctcaaggggcatcagggagtgaaatccagtggacggcgcgttcattccgggctgctgtgctgctgtgtgccggtattgcggttttattgatcggcgccgctctgtctgtttccatcggagctgccgatattcatctgcggacggtgtgggatgctctctttcactttcagccgcaaaatacatctcatcaaatcatacgcgatctgaggctgccgagaaccgccgccgccgcgctcgtcggggcttttttagctgtgtccggagcgattatgcaggggctgacgcggaacccgcttgctgagccttccattatgggcgtgacgtcggggtcaggatttgcgatcgcattggcatttgctttttttccgggtctgtctgcggcgggacttgttttgtggtcctttacgggagcgggaatcggagcgcttattgtgtttggcatcggcctgtcttcaaaaggcggtctgacaccggtgaagctcgcgctggccggtacggcagtcggctatttcttaacggggctttcaagcgcgattgcgatccgttttgatgtcgcccaggatgtgaagttctggtatgccggaggagtcgcttccgtcaaatgggaaggcatgcagctgcttttggcggtcggggttatcggactattgctggcatttctgattgcgcgctcagtgacggtgctgagcttgggtgaggaactggccaaagggctcgggcagtacacatcgcttgtgaaagtaatcggaatgtttgtcgttgtcctcttgacgggggcttcagtctcagtcgccggagccatttcttttatcggcttggtgattccgcatatcacccgatttttagtcggggtagattacaggtggatcattccctgttcggcggtattcggcgccgttctgttagtcttcagtgatattgccgcaagactcgtcaatgcgccgtttgaaacaccggtcggcgctttaaccgcccttatcggcgttccctttttcttttatttggcgcgcagggaaaggagagggctgtaatgaatgtaaaatcgaaaaaaccgctggcggtcatggccgttacgtttgtgctcatatgcatcgtcttttttatcagcttaaacatgggtgtgatccggattgcgccacttgatacgatgcgtgtctttttcggacagggggatgcccgggatcagctcgttttatttgaattcagactgccgcgcatggtgctgtcattgcttgtcggcgcaggaatcgcggtttcaggcgcgatttttcaaagcgtgtctcaaaatgacttggcggagccgggcattctcggtattaacgccggggcgtctttggcggtcgttctgtttatcttctttttccaagggtcagctgttgatctaagcatggccagtacatggctgcttccggtgagcgctttggcgggggcttttctggctgcgctgctcatctatgtgctggcttggaaaaaaggcgtttcacctgtccggctcgttttggtcgggatcggtgtcaatgcggggtttaatgcgcttctcttgatttttcagctgaaaatggacccgcgggatttcatgcaggcgcttgtatggatttccggttcgatttggaacgccaattggaaaatggtgctgtccattttgccgtggctgctggttcttttaccgttcagcctctataaagccaggtatttaaatgtgctccagctcggtgatcagctggcggcggggcttggcaccaaggttgaaaaggagcggcgcgttctgctgatgtccgccgttgccctgaccgcgtcatgtgttgcggcagccggcggaatcgcttttctcggactcattgcgccgcatttggccagaaggcttaccgggccgcgccaccagacgcttatcccggtttcagctttgatcggagcatttttatttctgcttgccgatacgctggcgagaaatgtgcttgcaccgtccgaagttcccgtcggcctggtgatttccgtgctcggagcgccgtattttgtatatttgctgatgaaaacgaaatagaggaaggagactgccgcgatgaactcattatcggcggaacagcttactgtcggttatggcgaccgtttgatagcgaaagaattggatatcgccatcccgaaaggaaaaattacaacgctgatcggtccgaacggctgcggaaaatcgacggttctcaaaacgatgtcaagaatcatgaaaccgaaatccggcgccgtctatttaaacggacaggcgatcatgcaaaaatccacgaaggacatcgccaaggaaatggcaattcttccgcagacgcctgaagcgccgagcgggctgacggtgtacgaacttgtttcttacggcaggtttccgcatcagtccggaatgggccgcttgagtgataaagaccgtgacatgatcaaatgggcgcttgaagagacggggatggccgaattttacgaccggccgatcgaagcgctttccggggggcagcggcagcgtgtgtggatcgccatggcgctcgctcaagaaacggagctgctgcttcttgatgaaccgaccacttatttagatctcgcccatcagcttgaaattttgcagctgctggacaaattaaacaaggagcagggccgcaccattttaatggtcattcatgatctgaaccatgccgcccgtttttcccattacatgatcgcgctgaaaaaagggcgcgtcatcaaggaaggaacggcggaggaagtcatgactcccggtatattggaagacgtgtttcaaattgacgcacagattgtaaaagatccgcgcacgaacaaaccggtctgcttaacctacgatttaatccggcatgaaaacgcaactgtaagatgaaaaaaaacgcagagccattccggcctgcgtttttttagtgcgcccggggctgcttttgtccggagacgcatttatccaaaacgaaaaaaacccccgccacaatcagctcctccgtcgttgacagccaaatcttttcaatcagtttatccgtcgtatacgcagtcatccagaggaacagcagctgaacggtgccggctaaaaggagaaaaggcagcctgcccgtcccaaaaaaggtaaagctatgtatcatcagccgttcaagcggttcaaaacataaaccgagaagaataaaaagcacggaaaaaagcaggacgtacgccatcgatccgtagctcgtcccggctaatgaaaatacggccatcatcacgatgaaatacccgaataatacggcagcggctgccagggcataccggagcacctgaagaaaaaacattttcgtcccgttttgattgatcatctgttcagctccttttcacacagaggagacttgcagagacggaactctgcaagtcgggtgtgtatcttcagcatttctttttgacgacagggtgtttctctttcgaaagaatatccgtaaagtctttgcccagatccagatgctgctggacgaatttctcaggaagcatggcaagccattggttcagggacacatcggcatagtggtcatccttgaagatttccaggaagacgagcggctcatcccccaaattctccacatagtggcccattgcgaacgggacgtaaccgacatccccggcctgatagttaaatgttcttgcatggccgtccgatgcaaaaaccgtcatccgtcctttaccggaaatataatactgccattcatgcgtattcggatgccagtgcagctctctcattgcgcccggttcgaccacgacaagcgctgaagcgatcgttttggacactttgaagtttgtggaatccgcgatatatactttgccgccttccgtctcagcagtcggaccttcatcgagcaggcggtaagtgaacggataaggcacttcgccgttcgggccttccacaatgtcgtctttcagcttcccgggaaccggctcttcaaagatgtatttttctttccgaggcaggccggcgaggtctttttctgaaaccccgaaattgttggcgatgacatcaagcggcgtgtgggcaagccagtcagtcacttggaatgtgctgttttctgagaaggaaccgtcatcaaaaaccaagaggaattcacagccttctttcagcgcctgaatggagtgcggcaggcctgacgggaagtaccacagatctccttccttcacgtcatcgataaaactgcgtccctgttcatcaacgatcgtgacccgcgctttgcccgtcagcatatatgcccattcggcttctttatgccagtgcagttcacggatggcgcccggttttaaacgcatgttgacagatgccagattttcagaaatcggcagctcgcgaacggtcacctcacgcgcgtacccgcccttttccagccggttatgcacatctgagaaagagaatttcatattatccactgtgccgtgatccgtttccggcggcgtcagcatatccggattttggcggtctctttcaagattgcgcggaatcgtgacggtcgctcctttgtctcctctgatcggctgcgggatattgcagttgttttcttttgacatgtaaatcgtctcctctcaagctttgttttttcagaaagagaatgtgaaaggcctttcgttttcccttctgctttgttaagtgatgcgttccgatgaaaagtcaacttcgtgtgaaaattaatttttcattttctgatctttcagttccgtcatcagttcgatcagggcgtcaaacttcttctcaaaccgtgtgagaagatacatagcaatcagagccggaaagccgagattgccgatctgtctgaccgcttcttctataaaaacctgatccattgtcagccacctcctgacttgacctgcagtcatgtatataagtgaaagaaagagcggctcctgtaaacctgatatcccggttgagggtctttttttttgttccggcaaatccgggacataaggaatgcggaatcttagtcggaaaggagtagtttacttttttttgctttctttcatttaatttaaatagggggcggttttatggactatcaagttcttttacggtcaaaatgcaaggaaattatgaaacatccgatcgttaaacattttttaagtgacccaaagcattacgagaaatttaaaaatgtgctggaacattcagacgagaaggatgcaaaatcattggacgaccattttaaacagttttataaggaaatccggatcatcaaatatatgaactctatgatccggattttctccatcgattttgacaagcgcatccgtaaaaatcagaatcgctatccgctgacggtggatcagccggagggaggtgaagcgcttccctatgaaatgggaaaagacgcgtatgaagagtttctgcggaagcagggagatttgagccagcatgtccaaaaccgtgatttatacgaagcgcttcagacgttaaccgataaacaaaaaagcgtgctgacgaatatttatcttcacggagcgacgatgaaagagattgccgagtcgctgggtgaatcacggcagaacatttccaatattcataaaaaagggctcgacaatctcagaaagcagctggacaagcaaaaaaagggggaaaataagcagtgaacgggccatttgacttcaacaaagagaacacagataccgacgaaatggaacttttgatttcacgtttttcgccaatgataaaaaaaaaactgagcaatacatcataccaggaaagagaagaccttgaacaagaattgaagattaaaatagttgaaaaagcggacatgctgttatgccaggaagtgccgggtttttgggaatttattcttcatcttataaatgaaagctcctgacaaaagcggcggaatgatggatattccgctctgacaacgtgagaaaaacgagaagagatgtccgtctcgtttttcttttctgtttccccgcaagacctccgcactaaaaaggtaccaaatcttatccatataatgatatgatgaaaaaaacaaagagaaaggaacgtccaaggtggaaaatgcgtcaattttaattgtagacgatgagaaggcgatcgttgatatggtcaaacgcgttctcgtcaaagaaggctatcacaacattaagacagccggaagcgctgaggaagcgattgagtttgttaaacatgaaaccgcggatctgctcgtgctggatgtgatgatggaaggcatgtccggttttgaagcatgcaccgaaatccggaattataccgacgctccgatcttttttctgactgcccgttcttctgatgcggataagctgtcaggatttgcattgggagctgacgattatataacaaagccgtttaatccgctcgaattggcggcgcggatcagagcgacgttaaaaagaacctataagcgcgaagagaaaacggcggtaaaaacgtattcatacagccatttttcctattcgccgcaaaacgccgagctgatcgtcgggggcgagcccgtcagctgctccgcacagcttctgcaattgcttcaatatttctgtgaacaccctgatgtggtgctctcaaaagatcagatctatgaaaaagtgtggggatatccgtcttacggcgataacaacaccgtcatggtgcatatccgcaagctcagagaaaagattgaaaaagaccccagcaatccgtcttatattgtaacggtgcgcggcctcggctatcggtttattcccgatcaaggagaaaaaggaatccgctcatgagaatgcgcggaaaatttctgctccactttttcggacagcttctgcttgtcatcctgctgatgtccgttttggccgtcgcttctttcttctatttggattggcgtttcagcgaagcggaagccaatgcgggactgaccaaagcgacggcagactcgtttgaagcgtggcttgataaaaacgaagacggcacatgggatgtcgatgaatttttaaagatgtcggtcagaaagcagaagggctggctgcagatcattaatgacaaagaaaaaacggactacgcatacagagtgccgaaagacgtcccgagccattacagcagaaaagacctcttatccatttaccagtaccggaattttgacaactacaagctgaattactggacggtcacgataaatgatgagacctatttgattctgttcggctggaaatccgccagtgagcagcttctcacttacatcgaatcacaggagccatccctcgcttccctttctcaatataaaaaaagcacggttgattatattaaacgggaaaaaggggcggtctaccttctcgaaaacagcggcagactgctcggggatatcaacagcacgaaaaaagaacggaacaccgtcaatgagcttgaattgctgaaatacagttccaagccgtggaattacaaacgggaaatttcttttaaaagactcgataaaacgaaatggatggtcgcgtcggtgccgaaccccgtgtacatccccgatcacgagtttaacaaatcatttttgagaaatgtgatgaaaaccctcttcctcttgatcggaatcttagtatttatgatctgcatcctgaccatctggtactctttccgtttcggctggccgctgtttcataccatcaaatggcttgtcaatttatcaaagggccggcttgaagagccgaagaaccgcaaaggacagccggtcagcaaaaacaaaaaaggcaaaacaaaacagccgttccgctttttcgccgagattttcgaatcgatggatcagctgaccgacacgctgaagcgggataagaaaaacagagaaaaaatccaggcgacaagggaagaatggatcgccgggctgagccatgacttaaaaaccccgctgagcacgatttacggctacagcatgatgcttgaatcgaagcaatacgactggacaccggaagaagtcaaagaaatggggcagatcgtccgggaaaaatcagaatatatgtctaagctgattgaggacttaaacttaacataccgcctcaaaaacgcggccctcccgatcgaacggcggctgatcaacgtcgtgccgtttatcagaaacgtcacgaacgattttacgaaaaacacgttctcggaaggctatgacatcgcctttgaaaccaaaaaggaagacattcttttcgccattgatgaagcgtggttccgccgtattctggagaatctgctggcaaacgcggttaagcataataagaaggggaccgccattcgggtggtgcttgaggaatcagccgaacagctcattctgaaggtgaaagataacggaagaggaatggacgatgaaacgattcaccagctgtttaaccgttattaccggggaacgaatacgaaggggccgtcagaaggaacgggactcgggctcgccattgccaaagagctggttcaccttcataacggaaccatccatgtcaacagcagaatcagcgccggaacggtgattacgattctttttaaaaaagattgagtttggacgccgctttgtcgggaataacaatagaagactgacaagcaaaagaggtgttcacacatggaagcagcattacgagcagatacgagagcagttatcggagaaggccctttatgggacaaggataaggaatgcctgtactgggtggatatactgggcagccagctccatatcttcactccggctgacggaatcaaccgttccgttaaattcaactcatttgtcacggctctggccttgtattcaaaggaagagctggtgatgacgatgaaagacgggttttacctgtacaatctgcgggaagacacattgacgaagatgaagcagccgaaagacatgcgggaagatatccgtttcaatgacgcaaaatgcgacccgtccggcagattatgggcgggaacgacgagcatggaaggcaaagaagaggaggcttcgctgtaccgtctgaatacggacggcagccttgccaaaataaaagaccaggtctccacctcgaacggtttggattgggatcgggaccgaaacctgatgtactatattgatactccgacgcaggaaatcgtctgttatgcatatgatcctgaaaccggagccgtatcagatccgaaaacggtctaccgctttccggagtcgcaaggatctcccgacggaatgaccattgaccgtgacggaatgctgtgggtggctctgttcggaggcggccgcgccgtccggattgacccgtttttgcataaggaaattgcatctatcgaagttccggcgaaatacgtcacctgctgcgcgttcggaggcagcaatttgaacacgttatacattacgaccgcgacggaaaaattgacggaagccgaaagacttgagcagccgcatgcgggcggcctgttttcagcagagcttgagacgggcggctgggagccggttccgtttgcaggcatgatgtaaaaaaaagccctggcatatggggaagttccccttgtgccgggcttttttgtgttaaatggagcggatgatgccgccttcaacccgctgtgcggtgccgttaatggcagaagcagctgatgaagcgagaaatacaatcgtattggcgacttcttccggggttgcatagcgctgaatcaaagatgtcggttcattcactttaaaataatcccggacgaagctgtccgtgtcttctccggcagcctttgcggctccttccatgtaagaagcgacgccttcggtccatgtcggtcccggcagcacggagttgaccgtgacattcgtgcctttcgtcatttccgccattccccgggacaagctgattaacgccgttttcgtcattgaatacggaatcatttgcgcaagcggtttgactccggcttcactggagatgttcaaaatccgtccgctgtttctttcaagcatttgcggcagaaaacgccggcacaggcgcacggcgctcataacattcacttcaaaataccgagtccattcgtcatcagacacctcagcgaagtcctttacttcaaaaaaaccgagattattgacgagaatatcgacttccccgattccgccggcgcgcttgatcaggtcatccgcctcatcctgacgcgataaatccgcagcgatgccgtgaaccgttccgtaagcggaaagctcctcaaccgtccgttccacggtttctttttttcttccgtttacaatcacctcggcgccttcggctaaaaagctttttgccgcggcttttccgatccctgaagttgatcctgtaatcaatacgagctttcgttcaagctgtaattccatgataatcctccttattacaccattgtgtaacagtatacatgatgaattttagtgtgtacgaacaatttgctttcatgcaaaaaggccggatatacaagccttaaagacttatagtataattactgcgaaaaaaggatacgaatgtcaaagagacaatcgtttaccataatcagggggagttaaaagaatgaagaagatcactgccgtctgggcggcgctcttggtcaccgcctttgtgatcgccggctgttccggcgcacaggaagaaggaagcgcggccaaacaaaaagccgtctcaaccgaagcattcccggtaaccattaaggatgccgcgaacgaaaaagtaaccataaagcaggcaccggaaaaaatcgtttccctcatgccgagcaatacggaaattacatacgcgctcggactgggagataaggtcgcaggcgtcacgacaaatgatacatatccgaaagaagccgtaaaaaaaccgaaagtcggagatatgaatgtgaacgctgaaaaagtcatcgcgctgaagccggatctcgtgcttgcccacgcgtcctctatgtccgcttccgccgatgcgatgaagcagctgaaagatgcgggcatcaccgtcttaacggtcaatgatgcgcaatcgttccaagatgtgtacaaatcaatcagcatgatcggaaaagcggccggcaaagaaaagcaggcggatcagctgatccaatcgatgaaatccgacctttccggcatagaaaagaaagcggcggccatttctgaaaaagacgaaaagaaagtattcgtcgaagtgtctcctgacggctacacgacggggaaagacacgtttatgaacgaaatgcttgaagatatacatgcgaaaaacgccgccggcagccagaccggctgggtgcagctgacggatgaagcgattgtcaaaatgaatccggacgttatcatcacgacagacggcgtaaaggccgctgaagtggaaaaacgcgccggctggggtgccgtcaatgcggtcaaacaccacaatgtctattctgttgatcctgaccttgtcacacgctcaggcccgcgccttgtcaaaggggtcgagaagcttgcagaaagcgtttatcctgaaacgtttaaaaagtaaccgcccgctggcctacacggtcagcctgctgtttttagccgtttgtacggcactcggcatttcaatcggcagtctgcatattcctttatccgacgttttttggatcgggatcggccggacatcctctgttgatcccatgaatgtaaatattatgatcaatatccgcctgccgagagtcgttctggccgctcttgtcggagccgcgctatccattgcgggggcggcgtttcagggacttctgaaaaatccgctcgccgacccttatacactcggggtatcttcgggagcctcggcgggagccgttatcaccttgtttttcggcattcagattcccgtcatcggccggttcacacttccggttgtcagcatcgccgctgccattgcggttatggcggcggttctgtttttcagccgcctcgttcatgcgtcgatgtcggtttcgacgctcattttgacaggcatcattatgaattcttttctcggggctctcatttcgcttgtgattgctttaacgggaaatgatctgctcccgattgtccgctggctgttgggaagcgtgtcaatgaggggctggggctatgtcgcgctgtttctgcctttttttctggccgggacggcgcttctgcttatcaatggcagagaattaaacattatgacttatggagaagaaaaggcaaagctgttaggcgtcagtacgggaaaaagaaaactgctgatgatcgccgccggatctctgttgacgggaggagcggttgccgtctcggggacgatcgggtttgtcggccttgtcattccccacgtgacacggcttttgtggggacggatcatcgccatttactgccgctgtcagcattgacgggcgccgggtttctcattttggcggatttgttttcccgcaccgttattgagcctgtcgaattgccgatcggcattatgacggctttggcgggagcgcctgtgtttgccttgattctgcttcgccagcatcatggagggaaacgcttatgatcagggtgagcagcctgtccggcgggtacggaggccggatgattgtagaagatgtcagttttaccgccggaaaaggtgaatttgtcggcatactcggtccgaacggctcgggaaaaacaacgctgatgaaattgctgacgggaatgctctctccgtcaaagggcgaggtgctcgtcgcaggcaggcccgcgggcagatacaagccgcgggagcttgcgaaaattatggccgttttgccgcagcatacggagcaagcttttacatttaccgttaaggaaacggtgtccttcggcagatacccgtatcaaaaaggactcttcagacagatggatcaacatgacgaagacattgtccgggaagcaatggaaatgacgggcatcgaccgatatgcacagcaatccgtccgcaatctgagcggaggggagcggcagcgcgtctatctggcgcaggcgctggctcagcagcctgaggtgctgtgtctggatgagccgacgacctttcttgatctcaaatatcaaaaagacctgcttgatacggtgaagcggctgacgagagaaagaggcctgacggtcatcagtatttttcacgacctcaacgtcgcaagccaatattgtgatcagctcctgatgatgaaagacggacgcgcttttccgaagcagccaccggatcaggctttgaaaaaagagacgattgaagacatttacggcattaccgtcagcgctgttgcccggcaatcgtcgccgaaaccgctgatcgctttcatgccggaagcgcgggaggaaagagagcccgccggcgttccgttcgcctctctgataaacaaaagcggaaataccgtaacgcttcatacagaacggccgtttagaatgctgtcaaccgcatctgacggcccgggcttttcgtggagccgccggctttccggctcggcggcagctggtttgatctgccgtacgtttgattcggttacgatagccgtgactgcgcagtataccgtttgggtgctgatcagcggacgtttatcggaacagggatttgttcggctgttaacggcagcggctgaagcgagaatgcaggctctttccggcagactggcaaaaggcgacattgccatttgtgccttgcagacaggagaggcaatggacgtccctcacgcggaaagagccgtcagaagaggaaccgcggtatgtgtaaaagcggcggaagaaggaggaatacaacaatgaagctttatacgaaaaccggcgataaaggacagacaagcctgatcggcggcagaacggataaagacagtctgcgggttgaaagctacgggacgatcgatgagctgaacagctttatcgggcttgcgcttgcggagctagataattgtgagaattgcggtgatgtgaaagccgaactccgaaacattcagcatgagctgtttgactgcggcggcgacttggcgacggtcactgaacatagaagctatacattaagagagacatctatttccgcattggaagactgcatagaccgttacacggctgaagcgcccccgcttgagaaatttattcttccgggcgggcataaggcggctgctcagcttcatatcgcgcggaccgtcacaagacgggctgagcgtctcgtcgtgaaactgggcaaaacagaagagataaacgatacggtgatgcgttacttgaaccgcctgtctgattattttttcgcggcggcaagagcagttaacgcaagacagggcgttcaggatatagagtatgaaagaagcgccgcggtattccgtgatgatgaataacgttttgttcagccggcagcagcaagccggctgtttttttatagagatatccatcaattgaacctttattgacagaaggaaaatgtatcttatgcattattgactgaaaaattaaaaaatgagatattataagaaacattgtaaaataatgggggatttgatagatggatacatataataagagcgagagcatctggaataaaaatttcacccttctgtttatctcgaggcttgttaaattgtcaggcgacggttttgcctttaattccattctgtggtttttgatttttgacggggaaggcgcgatcggcacgtccctgctcattgcggtcacgttccttccggaggcgatgctggcgccgattaccgggccttttatgaagcagcatacgctgaaattctggatgtatttctccgatctcacgcgcgcggcggtcgtgttgatcattccggtctgttactttaacggtttttctcctttatggtttgtcatgcttctcatgattttgcattcagccacgggagccgcttataatcctgcatctatctcattaatccccaatattgtcggagaaaacagcctgcagaaagcgaatgcggtcatccagtcatcaggccagatcgtcagacttgccgccattacgctgagcggggtgttcttaacatttatcagtcccgcttattctttgtttatcgctcttatattctatcttctatcaggttttctcgtactctttatgtcataccaagtccagcatgccaaagaggataccgtcgccgtcagacagcgcgggacgtatgtcggaaggctcaaacggggtttcgttcttgtcaggaaacaccagattttatacccgctcgccatctattgtatcttcatgaattttgcggccgctccgtgggaggcgctctctgccgtttatgtcgccgaagatttaaacatgccgccgatcatctactcgcttttgaaagcgacaggcacgggcggagcctttttaatgggttttattttggctaaggtgaaggtgaacaaatacggtctcctgtttgtgtcagcgggaatcatagaaggggcggcatttttcatcaccggcctcaacacttttctgccgctcgtcttcctcgccgcgtttgcgttcggatctgccgtcagcgcgattaatgtgccggaatatacgattattcagacgtctgtggaccatgatgatcagccgcaagtctatgccgtcatccatatgatctcaaacatatccattccgctcggcgcggttctttgcggatacgcggctaacgccttcggtcccggaaaagtcattgccgccggcggtctcgttgaagtcctgtccggtctcggaatattgctctttacgaagctggccaaagctgaacgctcagatctcatcagggaaaaagaagcgagcatcagaatatagatttttcgtgaaacgccctgcgccgtccggtgcagcggcgtttttttatgcgaaggtccgggggttatacgactccggtctgatatgaaaatcaatctctgactcgttttgccggccgcgggatttgtttatagtaaagacaaggaaaacgaaaggaggatctgcatgaatataaatgtaaaaacggcaggcggctttctgctgattgtgttcggactttctgtctttttcggaggaggccatttcgcatttatcatcccgctggcgatcggaggcctgatgctttactggggaatcaaacgtttttcaaaaggccgggcggtatcgggtatcatcgcgggcttcatcggagctatgattctcgtcggttctcttccatttatcgttgccatcggactggctggcgccatggtgtatttcgggtggaagatgatgaagcagggcggctcagacaccgcttcccgccagtatgaaccggaagcggcatcaccgggctatcaatccggatttgactctgaatgggaagaatttctgaagaaaaaataaggaggaagacaaaatggtcttaaaaagaataagaaatatgttcgtcgcatctgttaacgaagggcttgataaattagaaaatccgaaagtcatgctgaatcaatatgtgcgtgatatggaaagtgacattgctaaggcgaaacaaacgattgtcaaacagcacacgatcgtccatcagtttaagaaaaaacaggaagacgcttccgaaacggcggcaaaacggaaaaaccaggctcagcttgcttttgacgccggggaagaggagcttgcgaaaaaggcgctgactgaaatgaaataccttgagggaaaagcggccgaacatgaaaaagcgtatgagcaggcgaaaacacagctggcagagctgaaagagcagctggaaactttagaaacgcgcctccgcgacgtaaaggataaaaaacaggcgctcatcgcccgcgccaacgcggcaaaagcgaaggaacatatgaacgcttctttcgacaaaattgacagtgaaagcgcctacagagagtttcttcgaatggaaagccgcattgaagaaatggaagtccgcgtcaaatacggcacttcagctgaggcgaacacagaatacagccgctcccaatattcagacgaggtggaagctgagattgaaaaaatgcgctcgctttctctggagaaaacagagcatcaaaaagcggctcatgaataatgtgcacaagggaagatcggcgcttttacgcctcttccctatacgcacgtatcaattctccggcttttcctttataataaaatgaatgaaaaaggatggaacgtaatgaagcgtaagatggccaaaggactgatggcggcgtccgttctgatctgctgtctgtttttggtgaaagaagtgtttgccgggcgtttttttccgctgtacgaaacagaagcggaatcggcaagcataccgccgcgtgccgtcaacagcctgtcggtttcatcggaacagacggatgtaaaaatcatcgcggaagcgcggaatgatatcgcggcaaacatggcgggaccggcggggaaaatgtttgtccaaagcaggggaaaaaccctcaatctcaaagcgaaggagaaagggttccaatttctgaatctctttcagcgtcctctgctgattgtccgcattccgtatgattatcatcgggacattaccgtccatacgtcaagcggcaccattgccgttgacggaaacaaggggctgtctcttgcgcacctcggcgtccgttctgtaagcgggaatatgtcgctgaagcacgtgaagacggatgtgtttgaagcgaaagggctgtcgggcaacctcacagcatcaggccttgcggcgaaaacgggggatatccgcttatcctccggacatgtcgggcttcaacatgcggcgggcgcccttgacgtgcgggtcgcttccggcagtgtcgacgcctcgcttgagatggcggatgctcccgtatccgtcaggcttgcgagcggcagcgcagcgatcagcctgccgaaagacggaagttttacggtgaacgccgagacggcaagcggaaggattcagccgtcttattcctttgagaaaacgagtaaggacggcggggcattcaccggtatgaagggcagcggcgccaggccgattgatataaaagtgacgagcggcaatattgcactgcaatagtcaaggaaaggaggggcaggcagctgatggcaaaaaaacagattctcggacttatcatcgccttattaggcgtcagcatgtttttgcgtattatcggcatcggcgacttcttgttttggccgctcttttttctgatcacaggctatatttttaataaatattcccgcggctggctcggctccgtcctgtatatcttcgccgcttttttatttttgaggaacctgttcagcgccacctttaacctgttcggctatgccttcgccgcctttctcatatacgcgggctacaggctcctgaaaggaaagcgcgtgtatgaacataaagagaagaaaatcaatcttgaaaaagaagagcagccaaagccttccgcccagacggaaagcagacagccggacctccgcagcttttttatcggcgagctccggatgatgaaggacccgtttgagctgaatgatttaaatgtttccggattcatcggcgatgtgaaaattgatttgtcaaaagcgatgattcccgaaggagaaagcacgatgaccatcagcggtgtcatcggcaatgtcgatgtgtacgtcccgccggatatcgaagtgtccgtcagttcatcggcttttatcggcgatatgaacctgctcggctctaagaaaagcggcatgagcccgaatctttataaagtatcgtctgagtacggcgactcgccgcggcggattaaaatttcaatttctttattcatcggcgatgtggatgtgaagtatttatgaggaaaaaattactcgccaatattcagtggcgcgccatgcggatgactgcggggctcagtctgctcctttgtgcggtgtttattacgctgatgctgctgtattacgggcttgacccgatgctgctgttttcttccggctggttcggtattccgtttgtggtcatcctgcttctggcgtctctttcggccggattgatttccggttatgtatacggcggccgcctgaaaacaagaatggatacactgattgaagcggttttgaaatttgaaaacggcaatttcgcttatcgggtgccgccgctcggcgatgatgaaatcggcctggcggcagatcagcttaacgaaatggccaagcgggtcgagctccaggtcacatcgctgcaaaaactctccaacgagcgggcggaatggcaggatcaaatgaaaaaatcggtcatcactgaagaacgccagcggctggcgcgcgatctgcacgatgccgtcagccagcagctctttgccatttctatgatgacatccgccgtcttagagcaggtgaaagatgcggatgacaaaatcgtcaaacggattcgcatggttgaacatatggcgggggaagcgcaaaacgagatgagagcgctgctattgcatctgcggcccgtcactttagaaggaaaaggcttaaaagaagggctgattgagctgttaaaagagttcaaagcgaagcagccgctggatattgagtgggacatcagcgatacgggtgtgtcaaaaggtgttgaagaccatctgttccgcatcgtgcaggaggcgctttccaacgttttcagacattcaaaggcgaccaaggtcaccgtcaggctcggcgcgaaacatcaaaagctgcagcttaaagtcattgataacggggagggttttacgatggatcaagtgaaagcatcctcatacggcctgcattccatcaaggaaagagcgagtgaaatcggcggcatagcggaaattatctccgtgaagggaaaaggcacgcagatcgacgtgaaagtcccgatttatcagaaaacaaaaggagagaacgacagtgattcgagtgttactgattgatgatcatgagatggtcaggatgggtctggccgcatttttagaagcacagccggacattgaagtcgccggtgaagcatcagacgggcagcagggcgtcgatctggccgcagagcttttgccggatgtgattttaatggaccttgtcatggacggcatggacggcatcgaagcgacaaaacagatctgcgcgaaactcaatgacccgaaaatcatcgtgctgacgagctttattgatgacgacaaagtgtatccggtgatcgaagcgggagcgctcagctatttgctgaaaacgtccaaggcggcagaaatagcagaagccatcagagcggctgccaagggtgaaccgaagcttgagtcgaaagtggcgggaaaagtgctgtcaaggctgcgccattcagagaatcagcttccgcatgaaacgctgacgaaaagagaactggaaatcctctgtctcgtcgcggaaggcaagacgaataaagagattggtgaagagttgttcattacgattaaaacggtgaaaacccacattacgaatatattgtcaaagcttgatgtcagtgaccgcacgcaggcagccgtatatgcccaccgcaatcatctcgtgacataaaaaaaggagagcggcgccggcacactctcccgagggacggggtcattgggacattccctttgttccgaaatccctgatggcgactttgactttgtattcaatatccgattcactgaagtgatgatcccagtcagaggatatctttttccatttatcaggataatgaatccggacttgatcgcctaacccggtaatatccactttcaactcatgctgcatgtaatcaatgaatgccataacatctgaatgaatgctgcgttttaccgcgtttttgatttcatttatataggactccttgaaagaatcttctttcggattccaatcctcagacagacggccttcaacaaaccgggtgacgataaacttgaattttccgtttttatattgtgtttttacattatatttgctggaaaatacctcgaaagataaataataattgtcatgctttgcaaacgtgacgcctccctttaccgtgcctgtgaacaggttcatattctggacttgtaaaggcgttaaatttgcataccagaatttatttttaataatggtagcgccccagatttccagtctgctgcccactttgcgcacttgaggaagggcaaaggtttcgcccttggcgattttctctgatatttcccccaatgtcacgggctccatcatccggatggtgaccgaattattctccgttaagtcatagatcgtatttgacgcaggttctccctggtcactgatattgaaaatatctttcgttttatccggcaccgtcatcacattgcagcttcttctcgtaccgttgtctctgataaattggttcatcaatgcgtcaagcggaatgtcatcctttaacagcgcttcggaaaacagcatgatacgcaagtgctgggagaaggcggggtgattttttaacgatgccgttcttaatgcttgatggacggtttcccctggagtggaagtcacctttgtcgtgtcacctgacgacgactgctgggcacttgctttttgcggaaccagaatctgctgtgtcacttccacattttcttccgcgggtttatctagcccgactccgataacgaggctcaagtcttctaaattgcggctgtcccagcacccggccaaaagcaatgtgcaaaatatgattacgatgtatttcttcattgtgcttttttcaccttccttttcacagcgacgactgcaaacatcagtaaaggcagcaaaaagaaaaccaagaagatatagccgagaatatcactgaacagcatcagcttgtttccgtcttttggcaacaatgatccgaagaatgtcgcgatgcctacgaagatgatgccttttttctgtttcagcccgaaaattttatgaagagctgatgtcgcgaaatatccgtatgatacataggtggcgaaaaactggatgatccagacaacaagcaaaaaggactcgaacctttcaataaaaagccctttgatttcaaatgattgaaagagcgcgatcgttggccagatcattgttttgacatcctgggtggttaaggcgccgacgacgagaacgtaggtaatgatgtataaaataatcgggatgccaaagcctatggccgacatgcggaatgtgtgctttttatttttgaggtactcggggagaaacagcataatctcaattcccaagaaggaaacagaaacgacggtcaaggaagccataacgggagaaaatccctgcccgagcaccggccgcaggttgtccagatcaaatattttaaagctgaaagaaaacaccaccagcaaaataatgatcgtaatcgttaaatagaaaggaaagagcctgccgatatcgctcatgccgccgataattaaataaacggaacaggcgataaagataaacagtgtgaccggcacgggcgttctttccaataaaaagaacttgaccatttccgccatcgcccgggcttcgaagctggcgactcctataaaatagagacagatcatcagattgacgatatttcccgcccatttgccgagtccttcattcatataatcaaataatgatccgtactgatgctttttcataatgagcgtattgagataaatcaaaaagataaagatgacgccttccagacataacgcgatccagccgtccggcgaatttgccctggatgacagcgcccgcggcatggtgaggagccccgcgccgagcatcgtgtttgcaatcaatgctgtcccttgatagcttgtaagcttattgtgagttgttttctggctcatttacgtttttcgcctcttttggttgatttttaatagggagacggagaatagagtcgtttgcgttttttaagctgaaaaatccattcggcgagaaatacggagaaccgaagcttcgctgtctcgataaatgagtgtagatcgccagcataaataaaatcatgccgtacagcccgaaagctgccgcggtaaacatcgaaataaaacggagcacacggaacgacagacccatcccgtactgcggcaccgtaaatgaagcgagcgcgacaatgctgaccacgatgaccatgatggagctgacaatattcgcttcaacggccgcctggccgatgacgactccgcccaccaatccgatcgtctggccgagcgggctgggaagcctcaagcccgcttccctcagcagctcgattgtaatttccattaccatcgcttcaatgataggcgggaaggggacgttttctctgttcgccgcgatggtgactgcaagcgacgtcggcagcagcccttggtgaaacgaaacgagggcgatataaatggacgaaaaaaacagcgtgataaaaatagacgtaaacctgagcgcccggatgagcgaggcggaaatccaccgttcataataatcatcgggagactgcattaaaattcctaaagaagccggaaccaccagcgcaaacggcgagttgtcgacaaggatggcgacgcggccgttgaacaaggcggaagagactttatcaggccgttccgtattttgtatttgcggaaagggcgaatacttattatcctcaataagctcctcaagcgttccggaatcctggatgtcatccatcttcactttgctgaggcgctttacaacatcgctgacgacagacgggtccgccttatcatctatgtacatgaccgtggcgtattttaacttattttctccgatcggaacctttttcgttttcagcttcggatggttcgtgcgctgcctgatcatggcgatgtttgtatcagaatcttctatgaaggcgattttcggacctcttacgaccttttcggatgtgggttcatttacgcttcttttttctctttttcccgtggacaaaatgtatacgctgtcaagtccgttaataaacacggcgcattttccccgcagaatggagatgacggcttccttcgacgtaaagacgggacgggcgttgatcttatcaagacgtttcgccaccgtatccagcgtcagagtgtcttcctcctgaagcagcgtttcaatcgcctcttttattttgtcttcgtcgttcatttcactcagatacatataataaaaaacaagcccgttcggaagcatctttttattttgaaccaggtcatcattctgctctacgtggggaagcaccagtgccagattaacgtgtatgtattccttgaactccgattgcgtcatcgacagtcacccgccttccaatccttaattgaggttatcttttcctgttaaaaaaatgatatactatgataaagtatttaatggtacaagtttttttatgaaagcggaggagagatgtggcacaagtcagactggcaggaaatgccgaagaaattgaacagctcatcaaatcatttgaagcgcattacgaagtggcttacacgtcgaaagaataccgtaaaacaaatccgaagtataaatactctaaggattcgcgcgtctatcttgagctgaaattaaaaacggccaaggccgaaaaataaaaagggtttcatctgttactggcgaataatactcagggtgaagcaactgttatggagggatacataaatggactacagaattgaaaaagacaccatgggagaagttaaagttccggcagataaattttggggcgctcagacacagcgcagcaaagagaacttcaaaatcggttcagaaaaaatgcctcagcgtgttgtgaaggcgtttgcaatattgaaaagaagcacagcgatcgccaacgaacgcctcggcaacttagagtctgaaaaagcccaggcgattgccgctgtatgtgacgatgttttaaacggcaaatacgacgataactttccgctcgttgtctggcagacgggaagcggcacgcaaagcaacatgaacatgaatgaagtggtggccaaccgcgcgactgctttattgaaagaaaaaaattccgagctgaagattcatccgaatgatgacgttaaccgcagccaaagctcaaacgatacattcccgacggcgatgcacgttgcggcggttcttgccgtatatgagcagctcgttccggcgcttgatcagctgcgcgcgacgcttgatgaaaaagcgaaagcttatcaggatattgtgaaaatcggacgcacgcatttgcaggacgccactccgctgacgctcggacaggaaatcagcggctgggtatacatgcttgaccgttcgaaagaaatgattcttgagtcaacggaaaaaatccgcgcgcttgccatcggaggcacggcagtcggcacgggaatcaacgcccatccgcagttcggtgaattcgtcgcggaagaaatcacaaaagtaacggggcagacattcaagagttcgcctaacaaattccatgcgctcacaagccatgatgaaatcacttacgttcacggcgcgttaaaagcattggctgccgacctgatgaagattgccaacgatgtcagatggctggccagcggcccgcgctgcggaatcggcgaaatcgtcattcctgaaaatgagccgggaagctctatcatgccgggcaaagtcaacccgacgcaaagtgaggcgctgacaatgatcgccgcgcaagtgatgggaaatgacgcgacaatcgggtttgcggccagccaaggaaacttcgagctgaatgtcttcaaaccggttattatttataacttcctgcagaccgtgcagctgctcagtgacggaatgaattccttccatgacaaatgcgctgtcggtattgagccgaaccaagagacgattcaggaaaatctctctaactcattaatgcttgttacggcgcttaacccgcacatcggttatgaaaacgccgcgaaaatcgccaagcttgcccacaaagaaggcctgacactgaaagaagcggcattacagctgaaccttctgacagaagaacaatttaatgaaatggtgcgtccggaagatatggtgcacccgaaagcataaaagaaagaacggctgcagtcattgcggccgttcttctaaataaactgctgtttcagtaaaaatctgagctgttctgcatcttcagccagcaggtcggattccttcaaattcaaaatcattcctttgatgattgccggtttcggcgactttttcttcatttccgcttccagaatatccaagctctcggtgaattcagatgcttccgccttgtccatcgtgccgatgcgcgtgcggagggtctgcaagatcgattggcttaaaggatcgggctgcccgttatgaaggggcccaaacagtgagcttgcctcatcaagagaaataaatgcttcatcatgtctgcccgccattccgtttacgatgtcatcaattctgtgaatcacggtatttgccaaaagcgaaggctgtacggaccggccggtcagaatgagatattcaagatacatctgactgattccttctattaaaaaacaaagctcggctgtgtatggttcagctttttctccgtaaacagcaagaagactgtcgatatgaaactgcaggatcgaccggcggattctctttccgcactgcgccgcttcttcggtataaggaagtgaaccgtctttcatctgcatggtaataaaatcctgatgggcgagaatcgattcgtaaaacaccgcaagctgtttttgataagcggctctcggactgtcaccctccgtttggatcgtcgtgattcgggtaaacgttttatcatagtagtaattcagcatggataggagcagtgcttctttggaaggaaagtaaagataaaaagcgccttttgagattttgcattcatcggcgatttcctgaaccgatgtagatttgtacccttttcgggcaaacagtttgattgctgcttcaatgatcagcttttctttttccttcaatggttccaccctttcggagccaggaggctggcttgtgcttctcatgtatgactatatggtcatattgatattccgtaaatttaacctgattgtaacttgtttttttgttttgttttatttatattataaagtgagctgaccgaatggtcaaagttctggcgaaagggtgaatctgaaaatgaaagaattagatgaaatgatcagccgcttgcgaaacagaggaattaaagtcgaaaaggtgaaatatccgaaaaagacaatttgtgaaaagaaatgggttcatcaatgccaaaaaccgctgaaagcaaactacagagattttaacggctattccttcacataaaaaaagactgcaatgaaacactacagtctactttggtatgataattcggtagattacacccgattggtcattttcaattgaaattgatgctttatgcagggttaaaatccgttttacgatgctgagtcctatgccgaactcgcctttcttccctttattaaaaggctcgtacaagctggatagcatctcatcctcaatcggaggcccgtcatttttaaccgtcatgacaatctgctgctgattttggctgatccgaatgtgaatcgccgtttctgcatagcggatttgattttcaagaatgttttcaagaagtttgctccattgttccggatcaccgggcatcattaatgcatcttctgtatcaacgctccacaataattccttccgggcccatttgagccgttcaatgacttcttccgtgaccttcacaatgtcaaatgtctcatggtgcacccgctgcttcattaaataatcaagcttcgttaaatataataaatccttaattttcttctcaagtttttctgcttcgccttcaatgacatcaattgtggtttccagatcccccttaggaaaaatcccgtcctttattgattgagtatagccccttatcaccatgacaggcgtttttaaatcatgagagatattttgcaggagcgttctttccgtttcatccttttgcaccagcttgctccgcatgtcttcaatggtatggcctaattttccgatttcgtcttttctgtcgacgatgaccggatcatcccagtcctgttcggaaatccgtttgacatgcttctctaaggaaacgagcgggcgtgagagatatttggcaagccaaatcgccggaatccagcttaacaaaatcacgccggcaatgataaaaagcagctgcttgaacagggtgaatgccagatcatcacgataagaatcaagggcgtaagacagcatcatcgcatcctggccgttaatggtgaggccttttttaatgacgaaaaaaactttttcaccgctgatgtccgcgctgtatcgtttcgtgacgctgtgctggcggcccgcgagcttgtacaccttatggataaaggaagaagaaaaatagttcaagtctttgtcactggccgattcctcccgctccggcagaagaacgtgctgaacggatcggaaagtcgtcggagcggtcgcatcctcgctgtaatatccccgctcgatcgatccgggcagccggtactccgtcagtacatgctgttcattttcaatggtcgtatacgtttcatccgtgaaaaaattacgcagcgtatttgagaacagcacgagaagcagaatcgagatggctaagaggatgcctgagatgaccacccatatttgaaaagcaagcggcttatttttcatgacgtcatcatcctgtagccgaatccgtaaatggtctcaacctttaacccgggcattttttttctcagcctccgcacaaggtcatcgaccacccggtcagtgccgaaataatcatggccccatattttcagcaggatatcttctctggaaaaggggtgtcctttatggtgaagaaataaaagcagcagatcaaattccttagacgtcaaattgaccaggctgccggtttcatcataaacctcccgggcatcttcgatcacattgtaggaagaaacggtgatgccggttttctttgcggcgggctgttctttatacacgagctcgagcagtttctggacccgtataataagctctctcggcaaaaaaggcttggcgatataatcattgcttccaagctctaacccgaggactctgtcaatatcggcatcccgcgcggaaatgaaaatgaccggcacatcgggatctttttcttttatttcttttatcaatgtatagccgtccgtatccggaagcatgatgtcaagaatccacaagtggggagacggctgcatctgctttctggcatcttcgccttttgtgaaagatgtaatgttccagccttcattctctaaatattttgtgagcagttcattcaggttatcctcatcttcaactagataaatggtgtatgacaaggcatttcacatcctttcaacgtcattatactagttttaacatactcaagccgcattttcataatttcacatattcttttcatttttatcccacaatgtttgtttatgatgtgtataagggaagaaaggaagaaaaaaagcggggaagataacatgttcaaacacattttgttttggagctttgcttttctccttattattgggacaatagaacttgtacatgcgatgaatatgtaatcgatagaatgaaaacatgctgaaggagtgtgcgtgaatatgaacgatcatcgagatgacggcagaagccgcgatcagtcagatctttcacatacggaacaaaacagaaatgaacagcagcagatcagccatcaggagcccgagctgcttgaagggaccgtctcgaaagaaccggaaaacgagacggctgccggtacggaatttgaaaaaacggctgccgtgaaaaaagaaaaaaaacggagagccgcttggctgagcccgattttaggcggcattatcggcggaggcctcgtgcttggcattgtgccgaacctgccgggtgagcagcataagacagaagccgtttctgatacgaaacaagttcagtcttcgaattttacgtcaacgcctttgaaaaatacctcaagcgtagcggatatggtggaagaattggagcccgcgattgtcggagtgtccaactaccaagcttcgcaaagcagccagttcggacttgacggcggttcaagctctgaaacggaaagcggcacggggtcaggcgtcatcttcaaaaaagacggcgaaaaagcgtacatcattacaaacaatcatgtcgtagaaggggcgaacaaactgtcggtcactctttacaatgggaaaaccgaaacggcaaagcttgtcggaaaggatgccatcagtgacttggctgtattggaaatcagctcgtccaatgtcaaaaaagcggccagcttcggggattcctccaagctccgcattgccgataaagtgattgccatcggcaacccgctcggccagcagttttccggcaccgtcacacaaggtgtcatcagcgggctgaacagaacggtggacgccgatacatcccaaggcacggtggaaatgaacgtgattcagacggatgcggcgattaaccccggaaacagcggcggcccgttaatcaactcaagcggccaggtcatcgggatcaacagcatgaaagtcagtgaaaacggcgtggagtcgctcggctttgccattccgagcaatgatgtagaaccgatagtcgaccagctgcttgcaaaaggaaaagtcgagcgcccgtttttaggtgtgcagatgattgacatggcgcaagttccggaaacctatcaggaaaacacgctcggactgttcggcgaccagctgtctaagggtgtttacgtaaaagaagtgcaatccggctcaccggctgcgaaagcgggcatcaaatcaaatgacgtcattgtacaactgaacggcaaagatgtcgacagcagcgccgatatcagacagatcttatataaccagctgaaaatcggcgataaaacgactgttcaagtgctcagaagcggaagcaaaaagacgctgaacgtcacattaacgaaacaaactgaaagcgcaagctgagcgcataaaaaaagctgaaccttcaactgaggttcagcttttttcgtcattctcccaagtaggctgacagcatccacacatgcttgtccgcttcttcaactaatccgacaaacaggtcggcagttgacgggtcattttgttcctctgcgatgccgatgacaaattttgattcgcggctgatttgtttatagtcttgaaccagtgatttcaccatttcagaagccgttttttcctgaccttcatccgtaatggaagcttgttcaaggtaagtgtgcaaagtcgccgcaggctgtccgccgatggccagaagacgctctgcgatggcgtccgccgtttccgctgcttcgttatacagttcttcaaatttttcatgaagcgtaaagaagtgagggccttttacataccaatggaagcggtgcagtttagagtaaaggataaaccagtttgataattgtgtgttcattgatttctcaacaagagtttcagtttttttcgcgttttgtgtattcatattcatcgtcctccctgtgatctgttaatttaattatatcacgtatcaaataaaaatcaatactaaattataattattataatttagtttaagtgaacagctttttctttataatcgattcccaagcggaccacggaaagagtgagcggaaagccaatgtcagcttaacgcccctgccgatcggataccgcagtttcttcagccgtttcctttgtgccaattgataaatcagctccgctacgtcatcaggatcgccgcttttggatgcgttggctttgaagtaagcttcaaggggctgataaaagcgataataaggcgagtctttgccgggcgccgtaatatggctggagagagacgtctcccaaatagacgttttataggagcccggttctattaaagcggcatcaattcctaaaggcagaagctcgaggcgcagacactctgtaaacccttcaaccgcgaacttggaagagacatacggagatagagccgggaaaccggtcagtccgctgatactgctgatattgaagattttcgccccgccatgtttccgcatataaggcagcacggtttttgtgacgtgaatcagaccgaatacatttgtttcatactgctgtctgtaatgttccatcagcacatcttcaataaaccctccgtacgcagtgccggcgttattgacaagcagctcaatcggtccgaaaccgctgatggtgttcccgaagtcagacaccgactgctcatttgtcacatctaaagaaacgaccgtaatatatgcggatgcacccgcttgagcggcggcctctttcagtattacagctttctccggctgtctggctgttgcgatgacgtgataagaccgggcgagcttcagcgctgtcagcatcccgaatccgctcgtcgcaccggttacaatggcaacttttctgttcatcttataatcctccccgtttgtcgtttgttcttatctcatagtgtataacatctcgcggaaagaaggagaaatcgttcggaaatatgtcagaattgttttataatggagtcagcttcggatagaaaggggtaaagaaaagatggcattagagggattgaaggaaacatgggatttaaactccatttttgagggcgggagccggtcggaagagtttcagcaatacatacaagagctcaaaaagcatctaagcgcttttcaacatgcggttgaagcatttacagttccgacgcacgcggatgaaagccgggagctgatcaatctgattgataggtttgaacggtcagcgatcatgatcaggcaggcgggagcgttcgtcggctgtcttcaggctcagaacactcatgatcagaaagcgaatgaatggagagcgcggatcaatcagctgagcagtgattttaaatccgctctggtcacccttgacgatacacttgcccggattgacgagcgggtctgggaggagctcctgcaaaaaccggaacttcaggatctcacatatgttttaaatgagagaagagaccgggtcagagagaagctcagcgcttcagaagaaaggctgattgaaggcctggccgttgacggctatcacgcatggggcgacctgtataatgcggctgtcggcagaatgaagattccgtttgaggataaagagctgtcggtcggccaagcggaaaatatgatggcgcacccggatcgccgcatcagacgtcaagtgttcaaagagcttaatgaagcctggaaaggagaagaggagcttttcagcagcacgctgaaccatctggccggcttccgcacggaaatctataaagcgcggggctggaaaagcgctttggaagagccgcttgcgatcaatcggatgaaaaaagaaacgctggatgtcatgtggcaggtcattaccgatcataaaaagccttttgccgaatacctgaatcgaaaggcgtctcttttagggcttgagcggctgaactggtatgatgtgggcgcgccgatcggcgaggcttcgaaagaatacacatatgatgaagcggctaatctgatcgtcagccaattttcgacgtttggcaaaaagctgtccgcattcacggaaaaagcgttccgcgatcggtggatagaagcggaagaccgcagcggcaaacgggtcggcggtttctgcaccagctttcccgacagcggagaatcccggatttttatgacgttttccggaagcgcttcgaacgtatcgacgctggcgcatgagctcggtcacgcgtttcatcaggaggccatgctccaagtgcggcagctgaacagagcctacgctatgaatgtggctgaaacagcctcgacctttgcggaaatgatcgtcgccgacgccgctttgaaacaagcggagacaaaggatgaaaaggtgttcttgcttgaagataaaattcaaagaagcgtagccatgtttatgaatattcatgcgagatttttatttgaaacgcgtttttatgaagagcgcaagcagggcgtcgttccggctgagaaactgaatgaactgatggaagcggcgcagaaagaagcattttgcgattcattaggggaataccaccctcatttctgggcgtcaaaactgcattttcatattacgggagtgccgttctacaatttcccgtacacgttcggttatttattttcgcttggaatatatgcaagagctcttcgggaaaaagcggattttgaagaaaaatatatcgcgcttttgtgtgacacggcttcgatgaccgttgaggatttggcgatgaagcaccttggagcggatctcacggaacggtcgttttgggaagacgcggtccgccttgccgtacaggatgtgcaggaatttttagagctgactgaatgataatctggagatgaaccggccggagctgttaccgctccggttcttttttgttccgtgaatgacagccgcctcccttggaaatacctaaaaacgatcggaatggaatgggagtgaatcgcatgaaatggatcagaacggcgggcgttttatgtcttacgctgatgctgattgccggctgccgattgaatgaagaaaaacgggaagcggaacaagacagcacacctgtgtcatccgagaagccggttccttacagcagcttttccctgcgcgtcagctacggagccggagagcataaccgctatgaaggtttgtatgaaagaaaaagcggtcatgaaaaggcggacatccgggacaagctctcaggggttcacagagagggcgaggaagcgcttgatgaaatgaagatgatcctcggagaacttgccgtaaacggccggatgcaggaaagcgaggtcgtccgggaggtgctttcggcttttaatttggacagccgctatgaccatttttatctaaaactgaaaaagaacgatggagtaatgacggaaataaaaaaataaccgccgcccgctgcttttttacccaaaactaattgataatgatattcagagtcattaatttctgttacaatataatcatgatctcacgttgaatgtttaggcaatttgtttatatacatagtgttgggaaactcaaaaaaggagcggttagcggtatgagtgcaatttctacagagacgctgagcttagggtacggagagactgttatcattgacgaattggatgtcgcgattccaaaaggcgaaatcactgtattgatcggaagcaacggctgcggaaaatcgacgcttttacgttcattggcccggctgatgaaaccgaggggcggttctgtgcttttagaaggaaaagccatcgctaagcttccgacgaaggaagtggcaagagagctcgctattttgccgcagagtccgtcagctcccgaaggcctgacggtgcatcagcttgtgaagcagggaagatacccttatcaaagctggctgaagcaatggtccaaagaggacgaagacgcagtcacaaaagcgctaaaagcgacgaagcttgaggaaatggccgaccgtcctgtggattccttgtcaggcggacagcgccagcgtgcatggattgcgatgacactcgctcaggatacggatatcattctgcttgacgagccgacgacttatctcgacatgacgcatcaaattgaaattcttgatttgctgtttgaattaaatgaaaaagaaaaacgcacaatcgtcatggtgctgcacgatctcaatctggcatgccgttatgcccattatctggtcgccataaaggataaacagatttacgcagagggccgtcccgaagaagtcatcacttgcgagcttgtacagcaggtctttgcaatgaactgtcaggtaacgcaagatccgctgttcggcacgccgctttgcattccgcacggacgcggcagatgtatcgtgcaggaagcggccctcaccgcccgattgtcataatcatgaaaaagggaaggaaacggtatggaagaaaaactgcagcagcagctggacggcctgcttgagaaatacactgaactattgcttggcgaaacaaacccggatgtaaaggaagaagtcaggcagtggattttgtatacacatatcgcaaaaagcatgccgccgctcgtcaaacattggaatcaatcctacccggacgccaaagagggcatcaaagctgcgatacagcacattaaacagctcaatgaagctcacagaaaaaaacaataaaaagctttcggcatcaaagagaggtgccggaagctttttttgctgaaaaggaatcaataaaggcgccgttcaattcataacgaagaactttaatgtaactaacacacccgtttgtttacttgctgaaccaagaaaaaaggaccgccgcagcaatcccttactctttcctatatatcacatttcctttcggatacgtaataactcttcaaatgcttttatatttgtatcaaaattgggcactgtttgagattcctcggcacatttgacttgtgctacaaccaaatcattaaaaggtgttgaaattccagtaccttctgccattttgggaataactccattaatataatcaatttcagttttgcgttttttctcaagatcctgaagcatacttgctcttaaaagcctggatggttccatggctgccctaaatgtttgaatacgttcaggaatctcattttcactttttaattccaaagattctaaatcaaggccgcccattttcgcaaatgtgacaccattggcgtgtccaaccttaatcgtctcatctgcgatatgaactgcgctgacaatgccgatttcatggtcaagaatatcaccgtattctccgtttaatgctgccgataaaccactgaatgcattattgataagtaattttgaccacttcgttccaactaaattatcggaaatatgtgttccgccgataaggtctaaaaccgatttaatacgctggattctttctgttgtttcaccatttaattctccaatttgaaaagcgtactctttaaattgagtatactcagttgtaagtctggatacgcctggttcaataaacgtagcaccaaattcaacagaacctgcaataacacgttcaccaccaacgatcgaagcaactttctgttcaggtataccgttttgcaaggaacatactacactatcatcctttaaaaaaggcagtaactctttaagaatggagtcattatataattgtttcgtcaggagcaatatgaaatcatacttgcctgacttgttttcaggggtaatggcttttacctttgcctgaaatgccgttgtaccaactactttagcacctatttgatttaaagtatctacatgttctttgtatgaatcaattaattcgacatccattccgccagcagacagatatgctccaactatggttcctaaagaacctgctcctaaaattgcaattctcattgtaaacgtctccttatttttcctctaagtagttataaaccggctgtgctgcatttaaggttaaatccgtaataatatgagatgctgaaacgacttctaatacaggcaaatctgcaagaggcgccagagcatgttcaaataattgaagccgcgccggtccagaccaggcacctttaacttctatattcgttatttgcgtgcgcaccaaatcgcaaacccttaaatcaccattgtaatcagtagcaatcttaaccataaaattaggtcggcaaatttcccttttcgctttttccttgtccatttcgaaatgtttatatcccatagtcgcagctgccacacgaagactgccataatctaatgtgccaacgagagtatcagagtctatatacagcttaggggcgcccaatttctttggatatgcagtaagttcccgtccgcttgcaatagccgggaaattgtctacatacatagagtgtacataatctccttcttcaccattaaagctgacagggatgacttgtcctgcctctgtataggcaccaagtccggaaacatcgggcatccgcatcacttcgaatttcactaaaggttcagtaatttcaagaggttccggcactgccgcacgcaaagctttttcatccgttcggtaaataatatttaaatattcacggttaacaaatttataatttgggataggataagcaggagccgttagcggtgtatttaaattttttgctatatctttcacatcaattttcattgcatgacaccctttccttttctttaactatgctattatcttacatccgcatttacatttaatctaatacataataaggtatatatatatttattgaaataaataagggggatgcagacagatggaattgctgcagctaaaatactttcagacagttgcctatactgagcatatttctaaagcagcagaacaattaaagattgcccagccttctttaagtctcactataaaaagacttgagaatgaactgggaacagctttgtttgagagaaaaggcagaaatattaagctgagttcatcagggaaaattcttttaaaacatgtaaacaggatttttactgagattgaaaatgcacaaacggaaattcaattggaggaacatcaaatgtctgacaccatcagaatatctatttctaatccgagattccttgcaggactgatgagtgaatatatcaaccgctcccctcaatcaaaaattctccaagccatcggagttaaaagcgggatcctaacaagtttaaaaaaaggggacattgatttaggaataacaggtcatcctattcaagatgaagagatagaaagttgtatgctggtaaatgaagatattgttctggctttgccctcaaaccaccgatttacgggtaaaaccgaaatttctttacgtcttgtcgccgatgaaccatttattacccttgctaataatgaagagtatagcggttttacagcctcgctttgtgaaaaagccggtttcaccccaaatattgcatttgaggcggattctcatttactggccgagattataaagctggatcagggggtggcgttgcttcctatttcggtttgcagaacattggggctgaattttataaaagtgactgatcactctgcttcatatccagtcggcttatcttggatgaaacataagctgttatcttcttcggtaagaaattttcgtgactttattttgtcgtactataaagataactatgaaatgtttaaggtttattaaataattttcacccccgatttccaatgaggcggaagactggtcattcggaaacggagaggcccagatgatataaaaaaatcccgcggcatccgcgggatttttctttgttaaacggctttcgccttttcttcttgtttgcctgtctttttgtttgtcagcttaattgatttaacaaacagcgtgaggatcaatccggcagcgataaaggccaggcctgtgaaaaacacgctgtgaagcgaatccatcagtgacgttttcaaaaccggcacgatatgggaagaaaatgcggccgggatctgcttaatcgattcctgactgaacaaggattgaagcagcccttcaggatttttgtcaatcatacctttaaactgggcggcaaaggcacttgcctgtttcgggagtgagtctaagtaaggcaccagtctgtcggttaaaaggcttcctgatctggcattcatgacagcgccgagcaccgtaatgccgaacgttcccccgatcatccggaaaaattggcttgatgaagtcacaacgcccagctcttcttttgaaaacgtttcttgcagagcgagtgtgagaagcggcatgacgagccccattcccagaccgatcactgccatatagcacgtagccgcgagcttgcttgtatccagctgtaaggtcgttaataagaagaagccgacggccatgatcagcatgccgatcatgatttgcggtttaataccgatcttataaaccagctggcctccgataatacttgtgataatcatagataccatcatcggcgtcataatcgtgcctgacgcggtggcgctgactccgataattccctgcataaagaaaggaacgaacgtaacggcgccgaacatgccgatactcatgaaaaacccgatcagattcagtacggtaaacgttctgtttttaaacaggtacatcggcagaatcggttcttttgctttgatttcagcgaaaatgaatccgacaatcccggcaagcgcaagcgcaaagagaccgagaatctgccaagagccccatgcgtaatcttttcctccgaagctgagcgcgagaaggaggctgacgattccgacaatcattgtgaaaatgccggcgatgtcaaagttaatcggcccagtctgttttctgccttgaagtcctcttgcgataaagatcacggctaaaattccgacaggcaggttgatatagaaaacccatttccaatttaatgagtcaacaatccagcccccgatttgcgggccgataacggaagcaaggccgtaaatcgctccgaaaagcccttggaacttggcacgctgtttccctgtgaacaaatccccaatgacgatcatggccatcggcatcatgacaccgccgccgattccctgaagtccgcggaaaataatcagttccgtcatgttgctggccattccgcacagtgcggaagctcccataaaaatcaataaacctgacacatagacgacgcggcgccccaataaatctgcaagtttccccgcaatcggaacgatcgtcgtcgaagttaaaagatatgccgtggtcagccacgtcatcatgcttaatcccccgaggtcacccacgattttaggaatcgccgttcctacgatggtgccgtcaagggctgagaaaaacatggcgatgattaagcccgttattaataatgtgcgttttggatctttcttttcaatgctcatgtttcggcagctcctctttctattcgttttctttttgatcagccgcgtatttctcggcggcttccgctactttgcggatgatgttcacggactgaatcagttcatcgtcagtcagaacggacaggttacgcgccagtatcgctttccgtccttccacaacatcttcgaattttgtttcgccttttttggtgaggctgatgtcgatgacgcgtctgtcctgctggttatgtttgcggacgataagtcctttttgttcgaggcggtcggccatcagcgtaaccgcgctcggctttacctccatgcgttccgcaatttcggaaactttgcagctcccgtgttttttcaggctggctaaaacaaataattgggcaggcgtcacctcgtgttttgccatgctttccaccatttcaggctgtatgttttgcagcagcgtctgaagagatttctggatgtcagacacatattgatccgcgtttttcataactcctcctcatcttgttccttgagaaaataattaacattagttaaatataaataaggattaatgataagtcaatctttttgtgcaaaaataaaaaaaggactgatgcttggcgaaaacatcaaatcctttttcattttactgctggtagggagactgctgctgaatggtctgccggaacttctgatacgattgctgaagcttttgggtatcggcggcttcaatggaataccagccattttgaaacatcacatcgtataatcttctttgcgctttttgtgactcatcgaaaatcgcctgaatatcttgataaagagactcgtggctgaactcgtgcagggctgtgcaatatgaagccgtgatgtatttttccgtcgtcagcagctcattgaccaagtctctgtcattcatttgcgccgtattgggcacgggcgtttgcggattcgtgattttttgattttgctgttccatgtattgtcctcctattgcatatagcctgttgttgtctgtccgccttgaccggggttcaagcggcccaatatgtgctgataatgcttctcatgcatccggccgatctgatcaagctcttgttttaacgtctgattctggcagtgttccgccataaaatgcgcttttttcatggcaagcagattccagttcagcatgtcctcaagatacaaatggtctttcgttgagatgacggcaggcggcaagtttccgtgctgctcttggttgttcatataaacgcctccttcaattctgttctttttagctttctctgcgatcgggatttcatacagataaattaaaataaccacgatttgcaggagagacatcaatatttacaataaaaaaagacactatcagaagaaaaaaccttcggataatgtctgttcatgttaacagttcgatatatgcgaaagtcagcagcggcactaggattggacttcagctgccggtttattgtctagatcagtgccggcttttctttcagttatttttatttttggtaaaagaaaagcagaaaatactccggcaattaatagtataagccctgcgaaaaatacactgcgaagagagtccattaacgctgtcttcattatcggtatgatgtgctttgctatagaatgcggaaattgttcgaatgaaccagaactgaatagcctctgtagcaggacttgaggattgctgctgatcaagtctttgagatgagctgctaatgcgttttcttgttttggaaaattgtctaaaaaaggaactaatttatcggttaatatatttcctgacttggcattcatcactgctcccagaatcgtaattccaaacgtacctccgatagagcggaaaaattggcttgacgaagtaaccacgccgagcgtttctttagagaaactctcttgaagtgccagagtaataatgggcataacaaggcccataccgaagccgatgatagctacataagtagttgcagttaatttgctggtgtcagcttctaatgtggataataaaaaataggcaaaggatatgattgccatccccgtgataatctgcgctttaatgccgattttaaagaccagctgcccgcctataatactggagataatcattgcgaccatcatcggcatcatgattgtcccggactctgatgcactcatgccgattattccttgcatgaagaaagggacgaaggtgattgctgcaaacatcccaatactcataaagaaccctattaaatttaagaagataaaagttctgctttttagaagatgtataggcagaattggttctgcagcttttttttctgcaaatacaaaactaataatacttatagtggccaaagctaacagacaaaatgtctgccatgataaccagtcaaattcttttccgccgaaactgagtgtaagcagcaaacagactacacccgtaatcattgtaaacatcccgatgaagtcaaaatgaatcggacccgtgtattttctggcctgcaatcccatcgcaataaagaacacagctaccattcccacgggtaaattgataaaaaatacccaatgccagctgaaagaatctacaatccatcccccaatttgcggaccgattacagaagcaagagcgtaaataccgccaaatacgccttgaaatctggcacgctgtttgcctgtgaataaatctccaatgacaatcatagccatcggcatcataatgcctccgccaagaccttgtaaacctcgaaacacaattaattctttcatgttatcagccaggccgcacagtgaagagccaatcatgaatataatcagcccggccacatatactgcccggcgccctaatagatctgcaagttttccagcgatcggaacgatggaggtagatgttaataggtaggccgtagtcagccaagtcatcatgctcaggccgccgagatctcctacaatcttaggcataaccgttcctacgattgttccgtccagagcagaaaaaaacatagctataataagtccaattaataaaagtgtacgtttagattttcctgttgaatccaattgaaggttccctcttttcatatgtttcgagcttagtgattcttcaaaataaggtgaatggataactcaggcaggtcccttctttaaattccgttagggaagagaagccatctttaaagatgaaggatcgtaaagctattagaaagaaataataatgctttggaggtatgtttgtgaggcaaagataaattcagcagaattatcattttgaaattctgcttttccttcttaatagatacgttcaataaactgaattatcaattttaaatataagccattgtaaattataaatcaattatcttttaaggaatattttcaaattataaggggataaagaaatataaattataagtttttttgggcgaaatgtaacgaagaagcggaattatagctcgaaaactcaattgaagaagtagtgatttttattgatcctttttgtgactcattaaaaccgtttgaatatcttgataatataatacattgctttgacatcagagtctgtatggatatatgaatgatatcttggcaatctgcatggcttttgtgttttagctttctctgcgatcggaaattcatacacgaataaaagaaaaaggagggagttcatccttgctgcggagcatatgtttatttttgtcgaaaaataaaatgcttacaaaattcgcccaggcttacggaatccgcttcggcgcgggaaggttcgttgcaggggaaacgctcacggaagctgtgaaaacggtaaagcggctgaaccaaaaagggctgtcggcttcgattgattatctaggtgaatatgcgggttcagagaaggatgcgaaaaagacggcggaagaatgtaaaaaagcaatcagggcgattgccgagaatcaactggattgtgagctgtcgctgaaattaacatccatcggtctggatatttccgaggaactcgcggaacagcatgtcagagacatattgacggaggcaaaagaacgcggcgtgcctgtaacgattgatatggaggactattcaagatgcggccgtacgcttgagctgtataagcggtgcaagccggattttccgatgctcggcaccgtcattcaggcttatttataccgcgcagctgaagacatcagcggtctgatgccatataagccgcggctcaggcttgtaaaaggcgcttataaagaatcggcggccgttgcgttccctgataaaaaagcaaccgatcttcattttcagcagctgattaagctgcagcttttgagcggctatgaaacggcggtggcgacacatgatgacgatattatttcgtatacgaaaacactcatcagcgagcatcagattccccgggagcagtttgaattccaaatgctgtacggcatcagaacggagcgccagaaggagcttgccgaagaaggatacaggatgagggtgtatgtcccgtacggaaccgattggtacgggtacctgatgagaagaattgccgagcgcccggcaaatgcggcgtttgtgctgaaaggaatcttcaaaaaataacggctgctccaaaaagcagccgcagtatgttattccatgttgtcttttttatattgctgattttggctcgtccgtttgccgccgccgtatttttgcttcggtcccgcatttcctttcatgctggccgcgctcactgcggcagaagacggatcttttctccctcgcaccattcccttcacctccgggtttaagtttcccgcccgcgccatggaacatgcggaagccgaaaaatttaaaaaaattccatatttgctattgaagtcatcctgaaaatcttttaagatgaaagaagaaaagggtttcattttttttgccgaaaaaatgaatgactattcattcaaagttcaagggggatgactcatgcacaagtttataaagaaagcagccgttctcggatcaggcgtcatggggtccggaattgccgcgcacttggctaacatcggaattcccgtcctgctgcttgatattgtgccaaacgagctgacaaaggatgagatgaaaaaagggctgacattagaaagcccggaggtccgcagcagactgagccgatcggccatgcaaaagctgctgaagcaaaaaccggcgccgctgacttcggctgccaatctcgactatataacggcggggaatttggaagatgacgcagctcaattgaaggatgctgattggattattgaagtcgtcgtcgaaaaccttgacgtaaaaaaacagattttctcactcgttgatgaataccggaaaccgggaagcatcgtgtcgagcaatacgtccggtatctccgtcacaaaaatggcggaaggccgatctgccgattttaaggctcatttcttaggaacccatttctttaatccggcccgctacttgaagcttctggaaatcattccgattcaggaaacagatcctgacgtgctggagtttatgacttcatttgcagaaaacacgcttgggaaaggtgtcgtcatcgcaaaagacacgccaaactttatcgccaaccgcatcggtacgtacggcctgctggtcacggtaagagaaatgctttcttccggctgccgcatcggcgaggtggacacggtgaccggacctttgatcggcagaccgaaaagcgcgaccttcagaacccttgacgttgtggggcttgatactttcgctcatgtggcaaaaaacgtatatgataaagccgacggcgctgaaaaagacatgtttaagcttcctgaatttatgaatgacatgctgaaaaacaattggctgggcagcaaatcaggccaaggtttttacaaaaaagaaggtaaaacaatatatgaactcgatccgctgaccatgacatacggtgagcgctcgaaaatgaagacgcccgctttagaagccgccaaacaggcaaagggtgccaaaggcaaaatgaaagcgcttgtatattccgatgaccgcgccggacgcctgctttggaatatcacatcgcaaacactcttatactcagcccggcttttaggtgagatcgctgatgatataaaagcaattgatgacgccatgaaatggggcttcggatgggagctcggaccgtttgagatgtgggatgccatcggcgtcagaaaatcagcggagcggctcgaagaagaaggcgcagcactccccggctgggtgaaagaaatgcttgatcagggtcatgaaacattttatatgaaggaaaacggaacacaattttattattcagacggccaatacagggctgtgaaagaaaatccgaaacggatcagcctgcagacgttaaaagaaacaaaaggcgttatcactaaaaacagcggcgcaagtctggttgatctcggcgatgatgtcgcgctgctggaatttcatacgaaaagcaacgcgatcggcttagacattattcagatgattgacaatgcgcttgaggaaacggagcggaattataaaggtcttgtcatcggaaaccaaggcagacatttctgcgcgggagcaaaccttgcgatgattttaatggaagcccaggatgataacttcatggaagtcgattttgtcatccgccgttttcagcagacgatgctgaacatcaaatacagcgctaaaccggttgtagcggcgccattcgggatgacactcggcggcggcacggaagtctgtctcccggcggcacgcgttcaggcggcgagcgaatcgtatatgggtctcgttgaaaccggcgtcggtcttattccgggcggcggaggaaacaaagagctgtacatgaattatctggacggcggaagtgaactcatggacgcagcgattaaaaccttcgaaacaatcgcgcttgccaaggtgtccggttcggcacacgaagcccgtgacatgaagattttgtccgcggcagaccgtatcagcatgaatcaggatcacctgctgcacgatgcgaaacagctggctgcttccttatatgacagcggataccgtccgcctgcccgcaaaaaagtgaaagtcaccggagaaaccggctgtgcggcattactgctcggagcagaccaaatgagacggtcgggttatttatccgatcacgatatgaagattgcgaagaagctggcccatgtcattgccggcggaagagtcccgttcggcacggaggtttcagaagaatatttactcgagattgaaagagaagcctttttaagcctcgctggcgaggcgaaatctcaagcgagaatgcagcatatgctcgtcaaaggcaaacctttacggaactaggagggtgtttatgagagaagcagtcattgtggccggtgcgagaaccccggtcggtaaagcgaaaaaaggatcgcttgcagccgttcgtcctgatgatttaggcgcgctttgtgtaaaagaaacgctgaaacgggcaggcggctatgaaggaaatatcgatgacttaattatcggatgtgcaacacctgaagccgaacaaggattaaatatggctcggaatatcggtgcgctggcggggcttcctcatacggtgccggccattacggtgaaccgctactgctcttccgggctccaatccatcgcttacggtgctgaaaaaattatgatcggcgcgggtgataccgtcattgcgggcggtgcggaatccatgtcgcaagttccgatgatggggcatgtgacacggccgaatatcgctttggcggagcatgcgcctgagtattacatgagcatggggcatacggcggagcaggtcgccgaaacgtacggagtatccagagaagaccaggatgcatttgcagtccgcagccatcagaatgccgcaaaagcccttaaggaagggaaattcaatgacgaaatcgtgccggttgaagtatcgctgacagaagtcggtgatgaccataagccgcggaaaaaacaatttaccttttctcaggatgaaggcgttcgtcccggcacgtcggctgacgtcttggcgaagctccgcccggctttttcaaaaacgggaaccgtgacggccgggaactcttcacaaacaagtgacggcgcggcggctgtcatgctgatggatcgcgaaaaagcatcgtcgcttggattggccccgcttgtcaaattccgttcctttgccgtaggcggcgttccgcctgaagtaatggggatcggtccgattgaagccattccgcgggcgctcaagcttgccggactcgaattacaggatatcgggctttttgaattgaatgaggcctttgcttcacaggccattcaagtgatcagatcgctcgggatagatgaagaaaaggtgaacgtcaacggaggcgccatcgcgctcggacatccgctcggctgcacggggacgaagctgaccctgtcactcattcatgaaatgaaacggagaaacgagcaattcggcgttgtgacgatgtgcatcggaggcggcatgggcgctgccggcgtatttgaactcatttaaaaaaagggggaaatgaacatgaaacaggaaacggtcaacgtcaaaaaaggcggcagctttctgattgaagagacgggatatgatcaaatattcactccggaggactttacagacgaacataaaatgatcggcaaaacgacagaagactatgtcgtaaacgatgtgcttccttatatcgatgaaattgaaaaccatcagtttgagcattcggtcagactgctgagaaaagccggagatctcggcctcctcggagcagacgtgcctgaagagtacggcggaatcggcctggataaaatcagttcagccttcattacggaaaagttttcacgtgccggcagcttttcgctatcttacggcgctcacgtcgggatcggttcattgccgatcgtgttcttcggaacggaagaacagaaaaaaacctatttgccggacttggcttcaggacaaagaatcgcggcatacgccttaactgagcccggttcaggttcagatgccctcggcgcgaaaacgacggctgttttgaatgaagcgggcacacactatattcttaacggagaaaagcaatggattacaaactccgcctttgcagatgtctttgtcgtctacgctaaagtggacggagataagttttccgcatttatcgtagaaaagaactatccgggcgtatcaacgggaccggaagagaaaaaaatggggattaagggttcatcgacaagaacgctgattttagatcaggcggaagtcccgaaagaaaatcttctcggcgaaatcggaaaaggccatgtcatcgcctttaatatcctgaatatcgggcgctacaagcttgccgtcggcacaatcggcgcttcaaaacgggtgattgagctgtctgccgcttatgcaaaccagcgccggcaatttaaaacgccgatctcaagcttcacgctcactcaggaaaagcttgcgacgatgtcagcgcggctttacgccatggagagctctgtatacagaacagtgggcttattcgaagataatatgagcagactgacggaagaggagcaaaaagacggacgcgaagtcgcgaagtccatcgccgagtacgcgattgaatgctcgctcaacaaaatgtgcggttctgaaacgcttgattacattgccgacgaaggggttcaaattcacggcggttacggatttatgcaggaatatgaagtggagcgcgcctatcgcgactcaagaatcaacaggatttttgaaggcacaaatgaaatcaaccgcctgatcgtaacgagcacgtttctgaaaaaagccgtaaaaggtcagctgccgctctttgaaaaagcaaaagcgctccaagaagaactcatgatgctgatgcctgaagagccgggctcagaacctcttgaacaggaaaaatacattgtcagacaggcgaaaaagatcgccctcttgacagcgggtctcgcggcgcagaaatacggcaaagagattgaaggcgagcaggaaatcatggtgaacattgccgatattgtcagcgcgctgtatgctttggaatctgccgtcctcagaacggaaaaagcaattgcggcggacggtgccgaaaaagccgcgcagaagctgttatatacggaaatctttgcccaggaagcccttcagaacattgaagcgcacgccaaagaatcactgatcgccatggaggaaggagattccctccgcatgatgctttccgtgctgcgcaaactgacgcgcctgacgccgaaaaacctcattcagaaaaaacgtgaagcggcagcagccgtcttccgtgaagaaaaatatacagtctgatcacatgctgaaagcgctccttcatcaggggcgctttttcatgaagcaacgttataggtttttacaagtgattgtgttaaaataacgacgatcatttacaaggggtgaagaagatgtcgttaaatttttactggtaccctaaatgcggaacgtgccgtaatgcgaaaaaatggctggaagaccgcggtaaggaaataaacgaaatacatatcgcggaggaaactccgtcgaaagaagaaattaaagacctctatgaaaagagcggtcttgagctcaaaaagtttttcaacacgagcggaatgaaataccgcgagctgaacttaaaggaaaaactgtaccatatgtcagaggatgaacagctcgaacttctggcatcagacggtatgctcctgaaacgcccgattacgacagacggcgaaaaagtcactgtcggctttaaagaagaccaattcgaaaaatattggatgtaatgccaggttcaaagaattatggtatcttcttattataagaaaaaaatggagggatttagatgagcacaccgaaagatatgcgttattccaaagagcacgaatgggtcaaagttgaggacggaaaagcccgtatcgggattacacatttcgcgcaagccgaacttggcgacatcgtatttgtcgagcttccggaagtcggcgccgaaattaaagcggacgagccattcggcagcgtggaatccgtcaaaaccgtatccgaactgtacgcaccgattaacggaacggtgacggaagtgaacgaagaccttgatgacagtcctgaattcgtaaacgagtctccgtatgaaaaagcgtggatgatcgtcgtggaaccggctgatgctgaagaaatcgaaaacctcatgacttctgagcaatatgacgaaatgacacaggaagactgatcggatagcaaaggggccatttggacactctatctgtaacgggaggtgtctaaaatggcttttgataaacaaaaggtcgatgtgacggagaacgtcacgggccgctttcaaaacggccggttttccttgtttcatgaaaatgaagccatcggcgagatgacaggcatggaccagtacgagctcaaacagggcttttcatttgaaaatcaaaaattttataaaacagccgatgtcataaacggcagcgatccgaaatatgtcgattgcgattatgagaatggctggtgttaacagttggcggtgaatttcactgccttctttttcaatctgacgctaaaacaatcggcaggtgacgcgcttatgtacaacggagatgaaaaggtcattatcgtagaaggaaaatctgataaaatcaaagtcagggaagtgctcatcgaacccgcggaaatcgtctgtacaaacgggacgatcggccaaaccgaactggaagagttggcggaccgcctgtttgacagagacgtctatattttaacggacgcagatgactccggagaaaaattaagaaaacagctgaaacgggagcttcccgaagcgcgccatatttatatagacagaacatacaggcaagtcgagtcgtgcccgggccatcatctcgcatctgtgctgatcagagccggctttgatgctgacactgtatttttgaaaaagaacgacctgaggtggtaatcatgaaagaactccaagaaaatgaactcgaatcgattcaggatgacgtttatctcctgtatttgtacaccccgttttgcggcacatgccagctggcgtccaaaatgcttactgtcgtcgaagaaatgctgcccggtgccgccttctataaaaacaacgtgaattattcccccgcattcgccaaagcctatcagattgaaagcgttccgtgctttttgctgtttaaaggcggagagcttgttgagaaaggatacgccttccgctccgtttcctatttatatgagctgattaaacaaaaaacatcgcaaacgttcccgatgtgacaatatttacaggaaaatgtcgtgcggtttataaagggttctgtccgttaaaaagagaaagtgtatgtatggccattaaaacgggaggttatacgagtggagaaaatagaagtttcagagaatgacggacagcatctgtttttgaaaccgctattaaacgcctcaacgctgctgattacattccaaggagaaacagaagccttaacggtctcaattaacggacagggagaaatgagaaaaacgtcggcttcaaaggagaaatctaatttgaccttttacggaaaccagacggaaatcatccatctcctgcatggtgatgtctctttgcaaaagcttatccaaagcggaaaactcaaagtgaaaggatcattcagagccctgctgaagctggaggccatcctctggctgacaaacggattttttcaggcgatcagtaaacggccgtaactgccaatctactatgtgacaatagcttccaatatttattttattgactttttatcattcgccgtgctattctacagtaagaatttccggacgaaaatacgatatgttttctcttatcaagagaggtggagggaagtgccctatgaagcccggcaaccatcaacaatgttgaaatggtgccaattcactcaaagcggtctgctttgaaagatgagagaaaggcctttttcaataagcctttctgctcatttttgcagaaaggcttttcttttgcggagaaacccggaagatttcttagaatagtgtaaggcgggtgattgctttgatccatcttcaaaatgtttcaaaaatttacaaagcgaagcatggggatgtcaatgctgtccaagatgtcactcttgatatcaaaaagggcgaaatatttggaattataggatatagcggagctggtaaaagttccttaatccgtctcctgaacggccttgaaaagccgacgtcgggaaccgtggaagtcgcggggacggaattaaataaagtaagcagccgcgggctgagaaaagcgcgccaggaaatcagcatgatcttccagcattttaaccttttgtggtcgcgcaccgtccgggagaacattatgttcccgctggaaatcgccggcgtgaaaaaaagcgaacgggtccgccgcgctgatgaattgattaaactggtcggattagaggggaaagaaaaatcttatccgtcgcagctgagcggcggtcaaaagcagcgtgtcggcatcgcccgggcgctcgccaataatccgaaagtccttctgtgcgatgaagcgacatcagcgctcgatccgcagacgaccgattcaattttggatcttttatccgatataaatgacagactcggtctgacgatcgtgctcattacccatgaaatgcacgtcatccgaaaaatctgcaacagagtcgccgtcatggaaaacgggaaagtcgttgaagaaggcgaagtactccaagttttcagaaacccgcgcgaaccgatgaccaagcgtttcgttcagcaggtgacagaaccggaggagacgaaagaaaccatccagcattttctgcaggaaacagcgacagggaaaacgattcagctttcatttgtcgggcaggccgccgagcagcccctcattacggaaatgatccgaaactttgatgtggacgtcaatattctgcaggggaaaatttcacagacgaaggacggagcttacggttcattattcattcatattgacggtcaggaaaaagaagtagaaaacgtgatccggttcatcaaagacaaacaggtagaagcagaggtgatcacaaatgtttgaaaaatggttcccgaacgttgatataaccgagctgtggacggccacatatgagaccctttatatgacggtcatcgctttagttttttcatttatcatcggagcgattctcggtcttctgctctttttaacgggcaagggaagcttatgggaaaataaaatcattaacaccgtgattgcggcggtcgttaatattttcaggtctattccgtttcttattttaattattctgcttctcggctttactaagattctggtcggatcgattttaggaccgaatgccgcattgccggcgctgattatcggctccgcgccgttttacgcccgtcttgcggaaattgcgctccgggaagtcgataaaggagtcatcgaagctgccagatcaatgggagcaaagacatcgacgattatcttcaaagtgctgattcctgaatcaatgcctgcgttaatttcaggcatcaccgtgacggccatcgccctgatcggatctaccgccattgccggcgccatcggttcaggcggactcggaaaccttgcatatgtagaaggctaccagtccaataatacggatgtaacgtttgtagcgacagtatttatactcatcatcgtctttatcattcagattatcggtgatgtaattacaaatataatagacaaaagataagggaggatttacattgaaaaagattgtattaagtgcgctgctgcttgtgttcgcgggagttttagccgcctgcggatcaaacggctcgaataaaaaggaaatcgttgtcgccgcgacaaaaacaccgcatgctgaaatcttaaaagaagcggaaccgctcttgaaggaaaaaggctacacattaaaagtaaaagtgctgaacgattacaaaatgtacaacaaagcgttagctgataatgaagtggatgcgaactacttccagcacgttccttaccttgaacaggaaatgaaagaaaataaagattacaaactcgtgaatgccggagccgttcaccttgagccgttcggagtttacacgaaaaaatacaaatcactgaaagacctgcctaaaggcgcgaccatcatcatgactaacaatgtcgctgaacaaggccgtatgctggcgatgcttgaaaaagccggactgatcacacttgatccgaaggtaaaaacgattgaagcgactacgaaaaacattacgaaaaacccgaaaaacctgacattcaaaaaaatcgcccctgaattaacggcgaaagcatataatgaagaagaaggcgatgcagtcttcattaacgtcaactatgcgattcaaaacaaactgaatccgttaaaagatgcgattcaagtggaatcaacgaaaaacaacccgtacgcaaacatcatcgccgtacgcaaaggtgacgaaaaatcagagaaaatcaaagcgcttatggaagtccttcactctaagaaaatcaaagactttattgagaaaaaatacgacggagccgtgcttcccgtatctgaataaagcgaaaaccccggatgaatcatccggggtttttttcgggtattaatcggagaactgtccataataaaaaggaaggttaacgattggagggaatggcagtggctcaataccaggataacggaaaaagcgtgcatgacgcattgaaacaatataaagaaggtttaggcatattcgagcaaaaaatgcccatgatggggcggaagtttaatgaatttactgagcagtgtttctcagcggattcattaactgaaaaagagaaacaattaatcgctctgggcatcagcatcagcgctcaagatgaattttgcatgatttatcatacgaagggctgccttgaccaaggggccacagaagaaaacatccttgaggtcatcagcgtcgcggcggcattcgggggcggcgcggctctcagtcagggagtgaccctcgtgcagcagtgtattcaggaattcggacatacgacgcattagaatgagcaatcgtgtgaataccgtttttcagataaagcgagcgccggtttccggcacattcgaaaggattcaggggcacaccctctttggccggagcagcggatcattgttacaatagaaacaaatatatgaagggattgattcattatctgcaccagccacgagagactggaccttgactatacgcctgaaatggaaaaagcgatgcagaagtcacacggcatcggctacgaggaatacggacggcgtctttcaaaaaggatggaagtcgaacggcagagggagcttgaatatcaaaaaagcaagttcctcgcagcgcagcttaatgagaaaatcggtcagtaaaaaagggtggatttccgccctttttctgtttcaaacagctttaattacgccttgatctttgataaactttaggaatgttccgggtaatataaaaagttgtatttacttttcatttgttataaaattagaatgagaataaattgagaataatgattatatattttggaggtatagatatggctgcttcaacattaacgatcaaggatcttcacgttgaaatcgaaggaaaagagatcttaaaaggtgtaaaccttgaaataaaaggcggcgaattccacgctgtcatggggccgaacggtaccggtaaatccacgctctcagcagcgattatgggacacccgaaatacgaagttacaaaaggaagcatcacgcttgacggcaaagatgtactggaaatggaagtggacgagcgcgctcaggcgggtcttttccttgcgatgcagtacccaagcgaaatcagcggtgtgacaaatgccgatttccttcgctctgcgattaacgcacgccgtgaagaaggcgatgaaatttctcttatgaaattcatccgcaaaatggacgaaaacatggagttccttgaaatggaccctgaaatggcgcagcgttacctgaacgaaggtttctcaggcggggagaaaaaacgcaacgaaatccttcagcttatgatgatcgagccgaaaatcgccattcttgacgagatcgattcaggtcttgatatcgatgcgcttaaagtcgtttctaaaggaatcaacaaaatgcgcagcgaaaacttcggctgcttaatgatcactcactaccagcgccttctgaactacatcacgcctgatgtcgttcacgttatgatgcaaggacgcgtagtgaaatccggcggcgcggagcttgcacagcgccttgaagcggaaggttatgactggattaaacaggaactaggcattgaagacgaaactgtaggccaagaagcgtaagcgttagggggataatcatgacattggaaacgaaactatccgtagatcaggaatatgtcaaaggcttttccgaaaagcatcaagaacctgcctggctgaaaaacctgcgcttacaggctcttgaaaaagctgaagatctgccgctgcctaagcctgataaaacaaaaatcacaaattggaactttacaaagttcaacaagcatacagtagaaaacgcgccgcttgcttctttagaagatttagctgatgaagcaaaagcgctgatcgatatcgaaaacgaagataaaacgttatatgtgcagcgtgatcaaacgcctgctttcctttctctttcaaaagaactgaaagacaaaggcgttattttcacggacatcttaacggctgcccgtgagcacagcgacctcgttgagaaatacttcatgaaagacggcgtaaaggtcgacgagcataaactgactgcgcttcatgcggcattaatgaacggcggggcattcctttatgttcctaaaaacgttcaggtggagacgcctgttcaggccgtttacgttcatgaaagcaatgacacggcattgttcaaccacgtgctgatcgtcgctgaagaccacagctccgtcacttacgttgagaactacatcagcacggtgaatccgaaagaagcggtattcaacattatcagtgaagtggtcacaggtgataatgccagcgtgacgtacggcgccgttgacaacctgtcagcaggtgtcacaacatacgtcaaccgccgcggagccgcgcgcggacgagacagcaaaatcgagtgggcgctcggactgatgaacgacggcgacacgatttctgaaaacacgacaaacctctacggagacggcacatacggcgatacgaaaaccgtagttgtcggaagaggagaacagacggaaaactttacgacgcagatcatccacttcggtaaggcttctgaaggctatatcctgaagcacggagtcatgaaagatgccgcatcttccatctttaacggaatcggcaaaatcgagcacggcgcgtctaaagcaaacgctgaacaggaatcccgcgtcctgatgctgagtgaaaaagcacgcggagatgcaaacccgattctcttaattgatgaagacgatgtaactgcaggacatgcggcatctgtcggccgtgtggatccgatccagctttactacttaatgagccgcggaattccgaaagaagaagcggagcgcttagtcatttacggattccttgctccggtggtaaaagagcttccgattgaaggagttaagaaacagctcgtctccgtcatcgaaaggaaagtaaaataatgaatatcaccgatattcgtgaacagttcccgatccttcatcagcaagtgaacggacatgacctcgtgtaccttgacagcgcggcgacttcccagaagccgcgtgctgtcattgaagcagtggatcagtattacagcaaatacaattccaatgtccacagaggcgttcatactcttggcacgagagcgacagacggctatgaaggtgcgcgtgaaaaagtccgtaagtttatcaatgcgaagtcaatggctgaggtcattttcacaaaaggcacgacaacttcactgaatatggtggcgctgagctatgcccgcgccagcttaaaacccggtgatgaagtggtcatcacccaaatggagcatcatgcgaatatcattccgtggcagcaggcagtaaaagcaaccggcgcgactttaaaatatatcccgatgcaggaagacggcacgctttcgctggacgacgtccggcagactgtcacaagccatacgaagatcgtggcagtcgctcatgtgtcaaacgtgctcggcacgattaacccgattaaagagatcgccaaaatcgctcatgacaatggcgctgtcatcgtggtggacggggcgcagagcacaccgcacatgaaaattgacgttcaggacctggattgcgacttcttcgcgctttcttcccataaaatgtgcggcccgacgggaatcggcgtgctgtacggcaagaaagaactgcttgagaatatggaaccggccgaatttggcggcgaaatgatcgactttgtagggctttatgaatcaacttggaaagagcttccgtggaaatttgaagcaggcacgccgattatcgcaggcgcgatcggattgggagccgcgattgattttcttgaagagatcggactcgacgagatttcccggcatgagcataagcttgcagcctatgcgcttgaccgtttcgagcagctggacggcgtgacggtatacggtccgaaagagcgggcgggacttgtgacatttaatcttgatgaggttcaccctcatgatgtcgcgactgtcctcgatgctgagggcattgcggtcagagccggccatcattgcgcccagccgctcatgaaatggctggatgtatctgctactgcgagagcgagtttttatctgtataatacagaggaagagatcgataagctcgcggaagccctccaaaagacaaaggagtactttacaaatgtcttttaatgcaaatttagatacattatacagacaagtgatcatggatcattacaaaaatccgcgcaacaaaggggttttggatgacagcatcgtcgtcgatatgaacaacccgacttgcggcgaccggatcagactgacaatgaagcttgacggcgataccgttcaggaagcgaagtttgaaggggaaggctgttccatctccatggcttcagcttccatgatgacgcaggccattaaaggaaaagatattgataccgccctttccatgtctaagattttctcagacatgatgcaagggaaagagtatgacgactcaatagatctcggggatattgaagcccttcaaggcgtttcgaaattcccggcccggattaaatgtgccaccctttcatggaaagcacttgaaaaaggagtcgctggcgaaaaaggcggcaattaaaagattggagtgaaaatggatggctaaaaaaatgcctgaaattggtgaatacaagtacggttttcacgataaggacgtttccattttccgttcagagcgcggattgacaaaagaaatcgtagaagaaatttcacgcatgaaagaagagcctcaatggatgcttgatttccgcctgaaatctcttgagcatttctacaacatgccgatgccgcagtggggcggggatttaaactctttaaactttgacgaaattacgtattacgtaaagccgtctgagcgttcagagcgttcttgggatgaagtgcctgaggaaattaaacagacatttgacaaactcggtattcctgaagctgagcaaaaataccttgccggtgtttctgcacagtacgaatccgaagttgtgtaccacaatatgaaagaagatcttgaagcgcaaggcattgtcttcaaagacacagacagcgcgctgaaagaaaatgaagacattttccgcgagcactgggcgaaagtcattccgccgactgataacaagtttgcggcgctgaactcagctgtttggtccggcggatctttcatctacgtgcctaaaggcgtgaaggttgaaacaccgcttcaagcttacttccgcatcaactctgaaaacatgggtcagttcgaacgtacgctgatcatcgttgacgaagaagcaagcgttcattacgtagagggctgtacggctcctgtgtacacaacaaactcgcttcacagcgcggttgttgaaatcatcgtcaaaaaaggcggctactgccgttatacaacaattcaaaactgggcgaacaacgtttacaacttagtaacgaaacgtacggtttgtgaagaaaacgcgacgatggaatgggttgacggaaacatcggttctaaattaacgatgaaatatccggctgtcattctgaaaggtgaaggcgcgcgcggcatgacgctctctatcgctcttgcgggcaaaggacagcatcaggacgcaggtgcgaaaatgattcaccttgcaccgaatacgtcatccacaatcgtatcaaaatcgatttcgaaacagggcggaaaagtaacataccgcggtatcgtccacttcggacggaaagcggacggcgcccgttcaaacatcgagtgtgatacgctcattatggataataaatcaacttctgatacaatcccttacaatgaaatcctgaacgacaacatttcattggagcacgaagcgaaagtatcaaaagtttctgaagaacagcttttctacttgatgagccgcggtatttctgaagaagaagcaacagaaatgatcgttatgggcttcatcgagccattcacaaaagaacttccgatggaatacgcagttgaaatgaaccgtttgatcaagttcgaaatggaaggctccatcggttaatagtaaaaccccgccatatggcggggtttttttgtttattgaatagtgaaatttccgtattcgcttgaccggacatgaatcggcccgtttaaattgtagttcttctctttgacaatatcgcggaaaacgtcgacacgggcaaccgattctctccattcatcctgggtgtcctcatctgccggattcatcagatcgtcatagcgtacatccaagaatttattgagccatttcttctcgtccgttccgtctttcggtgacccgcccatttttttgttcgtgcgtttaatcagggcataaaaggagtctggatcatcaccgtcaccatgctgaatcaccgtatcgtacatcaccgctttggccaaggccgttttcagtccggcattttctgaacgtttcatcgccggctgataatacaagctgtcgtttaccttatcctgggcagcgcggaaggctttatcattgccaagtgagcgccaggcagaagcgaatcctttcagattgctgatgtcatcgctttcgtccttcgcaagacgacgcaattcaggcaaatactttttcaatttgttattcggcaccgctttcgtatatacttcgactacttccagcgcatctccggtagccgtcgtaaagccggcccgcccgcaagtgtaacctcttccgtcatccaacgcttcaacatatccgtattggatttccgtctttccgttttcaaaaatgctggtcagctgttccgcacggcgcttctgatccttattcagcccggccgcaaaaaccgtaccgctcatcatcagggtaaaaaacatggtgaaaataagagatgaaaccgccgtcttcttccaaaaacctgcttttttcttcaaattgattttcattgccatacccctttcatatgtaagttacgcactcagtatacatgagggggtgatttttttgttgaaaacacacgaatttgtcaatattttgaatcctaagccctatccagcgcttcataaaaagaacgcaccaccttcaccagacagacaatcccgttctcgcatcattcttatctgtaacatagtcaacgcggtgaaacccgcattgtacagcctgctgaaaaagggcttcgagcatgtccggatctttgcaatataacgttacatacgagcaatctgcgatgagaagcacaagttcacaggaactatccaaatattctcatacgtattgatttccgttaccatcccgctcgggaaagctttcaattcagcacacaacatttcaggcagaaaagagagggaacgggcgatcacggaaatggtgagggtgctgaagcctggcggcacattggccgtgtcagatataaaaaatacatcacaatacagagcaattcttgaggaaaacggctttcagacaagaacgtattccttttattatacgtttccgttttcgaaacttatcattgccgtcaggactccggtaggaaccgggcgctctatttgttaaaataaataagacaaaacagatagaaaaggtgttacacatgaagtcttatatgattatcggagccggcattctcggtgcgtccgcggcttatcatctcgcaaaggccggtgcggatgtaacggtctttgacaggaaacacccggggcaggcgactgacgccgctgcagggatcgtctgcccgtggctgtcgcagcgccgcaaccaggcatggtatgcgatcgcaaaaggcggagcccgctattataaccaattgatacagcagcttgaagctgacggagaaacggacaccggctatcaaaaggtcggtgccgtcagtctccatacggatgaaaaaaagctcagccaaatggaggaaagagcttataaaagaagagaggacgctcctgaaatcggtgacattacgagactgactccggcagaaacgaaggcgctgttccccgcgctgtcggaggaatacggggcggttcatgtcagcggcgcggcccgggtgaacgggagggcgcttcgtaaggcgctgttaaacgcggccgttaatcacggcgcggctgtttacaatgaagaagcgtcaatattgacagaggacggtgccgttatcggtgtgaaaaccgcagaacgcacgcttactgccggccaggttctcgtaacggccggcgcttgggcgagagagctgcttgaaccgctcggcatccgtttttcagtatcataccaaaaggcacagatcgttcatttagagcttcagggagaggatacgggcggctggcccgtcgtcatgcccccaaacgatcaatacattctcgcctttgacagcggcagaatcatagcgggcgcgactcatgaaaacgataccggcatggatttgcgggtgacggccggcggcctccgcgagatttttgacaaagcattaactgtggcgccggggctttcagacagtactgtgatagagacaagagtcggtttcaggccgtttactcccggttttcttcccgtcatcggcaaagtgccgaatatcagcggactcctcgttgccaacgggctgggcgcctcagggctgacgagcgggccgtatctgggggcggaactggcgaaactcgcactcggccagcagacggaaattgatttgagcctttatgatccggccggggcgcttgaataaaaaatagcttttggcgcattcttatgataggatggagctttaatgaataagaggacgtgacccattttgataaaaataaaccttcctgctcctgatgtaacgattacggaacggcagcagtcaccgtcggaaaatgaaccggcgattaaagcgatttacggtttcattgattttcaccgcattccgagagacaaaggcggcatctttatgttttataacattcatgatgaactgctgtttgtcgggaaagcccgtaaattaagacaaagaatcaaaaagcattttgaagacaatgtgtcgcctgttaaacatcacagggacgaagtgtataaaattgaagtatgtgtcgtcaatgatccgatggaaagggagatttacgaaacgtacgcgatcaatacccttcagtcgaaatacaacattgagaaagtattttataaataagaaaaaccggagcttaagggctccggttttctttatgtttacagtgccagccacatcactgcaatatgcacgatcagcagacagtaaacgacgaggaacagctgaacgaccttttttctgaataacatgcagatcatcatgagcacaggaaaaatcaggacgccggccgttttattgattgatgtattcggacggttcgacacgtcatagtgaatggccatatcagcaggaagaaacggataaaacacaatcgacagaataaaggcgagaaccacagctccccacagcaccttatcattcatcaaaaacatatgaacactcccttttttacctataatagtattttagtgtgaaaaagttcatttttcagtatttatttgatggctgtgtgctgtatgggtatttttaaacgcggcggccgccattgagacgatcgctcttgcggtagcggccatcattttgacagtagcaagcgttgacgaagattccgatttaggaaaagagcagctcatcgctaatgtcgttgaccgcattaacgcacagcactgaggatgaagaaagaaaacgctaaggagacgagccttagcgtttttttgattgaagcatctgttttaaatatgcttctgaatcaaagccgagttcctcgtcggcttcttttttcagttcaagctgaagtcgcacatacgtgtcatatttcgggctgagcttttgaagtagattgctgaaaggcgatccttccttcagcgcgggcagatcagaagcggattctccgatcttgatcaggctttctctgtactcttcatctgtctccactcttttcacaagctgaatgatgatgtttttatgagtgtcccaagtggcggggtctctctccaaaatccgctcgataaattggtcatgctggactttgtgctgttggagctgagccgggtcctccttaccgaccagctgcatcatcgggtgtgcagccggaacttcttccatatcatccaatactttaataagctttgcccatatcgtttttttctcatctgtatcaatagaaaagtcgaggaacggttcaaacagcgcggcgataaattctccgaaatctcccgggaacagttttttcagctgaagtcccatatacttcggttcatctattttgacctcgccgatatcatgcagaattgaatcgacattttccgcatcttccacgcgcttgatcagcatttcagtcagtttccgttcctgctcaagctcttcaatctgccggctgagcttttgatgctgctggcgcagtatatcatgcagactgctgccctctaagaggaacgctttaatatcgcttacagacagtgccagcattcggagggcggcaatcattttcagcgtattcacgttctgagcggaatactcacggtatccgttatcagggtttttgctgacggtgattaaaccttcctgctcataatatttgatggcttttttcgtgagacccgtctgcctggcggcttcttttatattcattctgaatcactccctgcttttcattctaaacgtgtctctaagggtcaggtcaagaaagggcgggaaattagacgggtttattctatattttagaaatttcagaaaatatgattgacaacgcacctttgttgcgattaatataacgttatataatgttatataacattatataataaaacactgaggagtgaaggatttgagtcaaactgccgcacaagtgaatcacaaggttcaggctttcttggatgatctgaaaggaaaaacgattgaccacgtctttttcgtcgcttgcgggggttcttcagccattatgtatccgagcaagtacgtgtttgacagagaggcgaaagccatcagctctgatctctacagttcaaatgaatttattcagcgcaatcccattcagctcggagagaactctctggtgattttatgttctcagtcaggcaatacgccggaaacggtgaaagccgccggtttcgccagaaaaaaaggcgcgcttacgattgcaatgacctttgagcctgattcgccgttagcgaaagaagccgaatatgtcgcggtgtatgactggggtgagaacgcacaggcgataaatacgaattacggggttctgtatcaaatcgtgttcggcgctttacacgtgctggaaaaccatcccgcgtttgagcaggcgatcgacggactcaataaactccagaccgtatatgacaaagcgcttaaacaagaagcggatcacgcaaaggcattcgcgaaagcccacgaaaaagaagatatcatttacacgatggcaagcggtgcgaactacggcgtcgcttactcctacagcatctgcattctcatggaaatgcaatggattcattctcacgccattcatgccggagaatattttcacggaccgttcgaaatcattgatgaatctgttccatttattatcctgctcggcttagacgaaacaagaccccttgaagagcgggcgctttccttctcaaaaagatacggcaaaaaactgactgtgcttgatgcggcagcatatgatttttccggaattgacgattctgtaaaaggctacctggctcctctcgtattaaaccgggtgctcagaagctatgcggatgcgctggcggaagcaaggaaccatccgttaagccagcggcgttacatgtggaaagtcgaatattaagaacgcgcattatatttcaccggactataatgatatataacgttatagtccggtgacaaaggaggaaaagcatctgaaaaagctcatctgcctgttcgttctgttagctgtatgtctgtcagccgccgcctgttcaagccaaagcagttcctctgacggaaaagtgaccctgaagttttttcacaggtggccgaaggagccggaaaaaagctattttgaagaagcggtcaaagattttgaagccgctcatccggatattcatatccaaacggaagcggtcttaaacgattcttataaagacaaggtgaaagtcatgctcggaacaacgagccccctgatattttcttttcatggagcgaccggtttgcttataaattcatcaaaggagataaagccctcgatctgtcgtcttactatcagcaggataaagattggtcctcacagcttgtgcagtcacaaatcaaaccctttacgcatgacggaaaacagtacggtgttccgtggcaaatggacgctaaatcattcttttataataaagacatttttaatacattacatttgaagcccccggcgacatgggatgaactgatcacagtctgtgagaaattgaaagagaacggatatattccgatcagtttcggcacaaaagcgccttggaccatttctcattatatcgggacgctgaaccagcgtatggtggatgaaaaaacgcgggcgaaggattacagcccggaaaccggggagtttacggacgaaggctatgtcaaagcgcttgaaaagcttcaggaacttctgccgtactttacaaagcacgtgaactccgttgatcacgaatacgtgcgccagcagtttacgagcggcaaagcggcgatgatttatgcggaaacggcagaaattaagctcgtcgaaccggtcaatctgggcttgtttcctttcccgaaaatcagcggcgaaaagggatctccccgtgcactgaccggatctcccgaaggatttatgatttcctcaaaaacgaagcacccgaaagaagccatggaatttcttcagtttttaacctcgaaaaaaatgggagagaagctgataaaagacgtcggtaaatacagcgcggttcagggaacggcgacagaaaacaattccaccccgatccagcgcgaagccgtgcaggatatcgtccgcgccgaaacaatggtgccgtggtttgatatggatgttgacgttgaaatcgccgatgtgtatgcggcaggcgttcagcagatgctcggcggcacaatgacaccgcgcgaggtgatgaattccgtgcagaaagcggcgcgtcaggtcaaagcgtcatctgaatagaacagatttctttggagaaaggagatgaggatttctttggtcagccgaaagcgtttcattccgtatctgtttctcgcgcccgcgctggtttttctgctgttcgtttacattccgattattgagaatgtgtttttcagtctgtttgaatggagctcatttcaacccgaaaagacgtttatcggtttgaaaaattatattgacctgttccacgatcccgtgttttttacagcactccgcaacaatgtgctgtatgcggtcatatcgctgatttgccaggttggcggcgggttaattctggcggccgtgctggaagacagattggtaagaaaatggtcgccgtttttccgtacggtattttttcttccggtcgtcatttccatgaccgtcattgcgctgttgtttgattttatttataacccggaaatcgggcttttgaatcagctgctggaagccgtcggacttgatgaactgacccgggcgtggctgggcgatgaaaacaccgctatgctgtctgtcatttttgtgtctcaatggcagtctgtcggttacatcgccatgctgtacattgtctcgattcagagcattcccgctgaattatatgaatcggcgcagctggacggagccggaaaaatccagcagttttttcacattacggtgccgcagacgaaagaaatgtcgtttgttgccgtggtgatgacgctgaccggcgcatttaccgtatttaatgaaccgtatattctgaccggcggagggccgggcaatgcttcagaagtgctgagcacatttttgtataagagcgcttttacaaaggatatgatgggctacgcttctgcgatcgcgacggtggtgcttttgctgacgcttgctctgtcgcttattcagatgaaattctttaagaccggaaaggaggagtaggccgatgcttcctgaaaagacggacttgcgtcatgcccgtcaggccgtcagaacaggcggaaaaccgagaaaatggtatgtcggggaaacgtctgtgtggctgtttctctttatctacctcattgccgttgcttatccgctgttatggatggcggtcagcgcctttaaaagctcggatgagatttttgagcacagctggtcgctgccctctgtctggcatcccgaaaacttcgtatccgcatggaaccaagggatttccgcttattttatgaacagcgtcattgtgaccgtgctgacttgtctcatcaccgtatttgtgagtgcctgggcggcatacgggctggcccgttttcaatttaaaggaaaagggtttgtgctgatcatttgtcttggcggcttgatgctgacgccgcaggtcagtcttgtgccgctgtactccattatccagtcattgggactgtacaatacgtattgggcattgattcttccgtacgcagcctatcgtattccgtttaccgtgattctgatccgttcctattttttgtcgatttccaaagagcttgaggaagcggcctatctggatggatgtacaagtttcggaatatttttcagaatattcttacctatgagcgtgccgattctggtgacatcaggcattttgacggcttaccatacatggaatgagtttatgtttgcgattatttttatcgatgatgaaaatttacggacgattccggccgggctgatgcagttcagagatgcgctgcagacggattggggcgtgctgctggccgggctgacgatttctgctgctcctattatcgcgctgtttttattaatgcagagatattttatccgcggcattgcagcgggaagcgtgaaaggataagggggatgaaaagatgaaactgatagcggccggagataatgtagtagattattatcaggatcaggagacgttttacccgggcggaaatgcgttaaatgtagccgtgcttgcccggcgcttaggccacgaaacttcttatatcgggattctcggcagtgatgaagcggcggatcacgtattgaatgtgctgaaactggagaaggtgaatgccgatctgatccgccgggcatacggagaaaacgggatggcggtcgtcacgcttgatgaaagaggggacaggatatttgccggatcaaataaaggcggcgtgcaatcgcgtctgacgctcgcttttcaggagaatgacatctcatttatcgccggacatgatctgctgcatacgagcgtatacagcaggatagaacgtgaccttccgatgctgagcggccatgtgccgatttcctttgatttctctgtaaaacgtgacgaagcctatttagaagcggtctgtccgtatgtgacgtatgcgtttttttccgggagtgatttgagtgaaagtgaatgtgtgcggcttgccgaaaaagcccgcggtttcggagcgaaaatcgtttgtctgacaaggggagaacatggcgcggtgttatcggatggggaacgcgtctatcatcagccggtggtaagagctgatataatagatacattgggggcgggtgattcttttatcgccgggtttcttaccgatttcttcgaacatcaggatattcggcgagcgcttactgcggccgccgggacggctgccaaaacatgcgggggttcggagcgttcggttacgggcatccctacaggccggacggcgggaaaagcagtgaaaaaacgagaatacgataagcattgtctcgttttttatacttgttacgcataggggctgttaatggtaaacgtgacgcggtcggtatgcattaaaaacagcgaactgtatatcggctgttcttttgacataaaagcggttttgtcaatttcaaaaagcgcatccccgatatcacaagccagatagcggctttcttcctgcttggcgtatacgacatttaacagtttcgtattatgggtgggcaccacctgatagtgctgtttcaaaatgtcatgcatcgacacgccgcctttaatatgcttgccgatgtcgggaaataaactgagcggatagtgggcgatttcgaatgagagcggctggtcgtcgtgaaataaaatgcgttttaattcaagaacgggactttcggaagcgacgcgaagtttttgagcgatggatttaggcgcttcaatgatttcatgggaaaggatctggtgtttcggtttttttcccgttgattccataaattcagagtagccgttgaccgcgatgagctcccgcttcagtttagggcttttaacgaacgttccctttccctgctgccggacgagccagccttcttccacaagatcaaggatggccttcctgactgttatgcggctgacgttgtacgtttcgcacagctcattttcagtcggcagttttacggacggcgaataaacgcccttcttgatatcgtccgcgataatttgtttcagctgaatatataaaggtttcgagctcccgttatttaacaatgggacggacctcctttgtcaagtagtagtactattatatgtattatgatgttataatacaaatttgcctttcatttatgaatctgtcagaaaccccgaacatttttaacataacagaaagatgtggcggtttccagtattggaggaggtttcgaatggcatcattaacatttgaccatatcaaaaaaacatacggcgcccaatcggcggcagtgaaggattttcacttagatgtaaaggatgaggagctgctggtgcttgtcggtccctccggctgcggcaaatctacgacactcagaatgattgccggactggagagcatttctgaagggaagctttatatcgatggagacgcggtgaacgatctgcccccgaaggatcgtgatatcgcaatggtttttcagaattacgcgctgtatccccacatgacggtgtttgataatatggcgttcggtttgaagctcagaaagctgccgaaaaaagaaatcgcagagcgagtccggacggccgctgatattttggaaatcgggcatctgctcaagcggaaaccgaaggctctttcaggcggacagcggcagcgggttgcgctcggccggtcgatcgtgcgggagccgaaagtgtttctgatggacgagccgctttccaacttagatgcgaaactgcgtgtgacgatgcgcgccgaaatcagcaagctccatcagcgtttgaaagcgaccatcgtttatgtgacgcatgatcagacggaagcgatgacaatgggtgaccggattgtcgtcatgaatgaaggaaatattcagcaggccgcaagcccccatgagatttatcattatccggcgaatatgtttgtggcgggttttatcggttctccgagtatgaattttataaaaggcgtcatagaagaaagtcacgggcaatggtattttgccggttcgtccgttcgtctgcccattccgaaagaaaaagcggccgttcttgtgcagaaaggatacagcggtcaggagatgactgcggggctgcgtccggagcatttgacgcttgccggacaatcagagcacccgcctgaagcggtgtgccgcgctgtggcggaagtatgtgagaacttaggcgcggagatgtacgttcatgcggtgagcggagatgaccgcatgacgatccgccttgacggcgcttcagaggtgaaacccggcgatgccattctgcttgcggtcaatatgaaccgggccgtgttttttgatgccgacactgaaaacgccgtatattgaaaaagggagcctgatgatggggctcccttatcacttcttatgatacgattaccagatttcgtccgcccattccgggtggtcgataaacggattgcggttatgctgatagtcttcgtaaatgatttcgttccgccgtttttccttactgtcgacggggtcttgtttattccatttgagcaaaacggacagttttcccatgtaaggagctgagccgtttccggttttatcattcagctcaaggtcgggatacccgtcgccgccttcataacgcaccgccatgtaaaacagcatgcgggcgacgtctcctttgacctcatcgcgcggctcccaggaatcaccgtcataataattgcccggcgctttcgggtattctgagccgccgttatcaaaatccatgtttcctctggcgctgttcacctggacgtctgcagggcgcagatgatgaatgtccgtcccggggccggcagctgttccgaagtttccgtgtgactttgcccacacgtgttcacggttccagtccccgacgctgccgccgtttttacttttggcccgtgattcctgggtgtagagcaagatgacattgttcgggtttgccggatcttcgtcagtttccttcaatgcattccatacttggctgtaagacagctttgtatgtccgctgatgatgcggtgcagggcgctctttaaggctgttccgctttttccggaagcttctttgtaatatgtctccgtatccgcagacggagtgatgacagctgaggaagtttgcggaaaaagagttgtgccgccggcagttgaaaccgccagccggctgtacagattcgtgtcagccggcgcgcccgcagaggctgacggcgcggtccaacccaaaatgaaaaacaggcagacaatcggcagaaaccaaagtttttttgtcatgacttgccctcctttacctctattatccaaaaaataaatctaatattctatcttttttgaaaaatggttccttcggcttatgggacagaggggcggtttcttggtcaaagtatccggaaaatcattgattttttggaagatatgataatgaactcgttatgcgctccttctataatgaagatcatcttgtcagtttttcagtttaaaaggagggcatatatggaacatcagcagctttcggcggcgaatatcgggatttccgatgacatacaatggctgtctcaattcggcgcttccgcttccggcggagtgacgaggcttttatatacgaaagaatggatggacgcccagcttgccgtcaaaaagaaaatggaggcgttcgggctggaaacggcatttgacgatgtcggtaacgtgttcggccgtctgagcggcacagaatcgcctgatgaggtgattctgaccgggtcgcatattgacaccgttattgacggcggcaaatatgacggtgcgttcggcgtgctggcgggcatgctggcgatccggcatttgcatgagacgtgcgggcgtccgaaaaaaacgctggaggctgtgtcgctctgtgaagaggaagggagccgttttcccatcacctattggggctcaggcaatatcaccggtgctttctcgctttcagatgcggaaacgccgaaagacgcgtccggcatttctctgaaagaagccatgcggcagaacggcttcggtgcaggccgttatccggcgccgctgcgcactgatattagtgcctttctggaaattcatatagaacaggggcaaacgcttgaacgatcgggaaaggatatcgggattgtcaccgggattgccggacagagacgctataccgttacgcttgacggtgaatgcaaccatgcggggaccacttcaatgaaatggcggaaagatccgctcgcggcgggaagcagcatcatccatgaactcatgctctcagcggaaagacagccggaagagctccgcctgacgtgcgggaaaatgacggttgagccgaatatggcgaatgtcattccgggccgtatccagttttccgttgatattcgccaccagcaggaagacgtgctggcagccttccatcagaaactggtgtcgattattgaaaacatcagccgcagcaaaggagtcagaccctttattgatgaatatatgaggatagagccggttcaaatggatcacatactgacacgaaccgcagcacaggctgcaaaagagcagggggcggacccggagaagatcgtaagcggagcgggacatgacgcccagatgctcggcagaacctttccggcctgcatgctttttgtgccgagccgtggcgggatcagccactcgccgcttgaattcacacccgcacatcagcttgaaaccggcgtccttacgctggcgaatgtattacataaacttgcttattaacgtaaagggggaatcggcgtgccgaccagaaaagaattgtgcattccgcaaagaacgataatgacaccgggaccgacagaagctgaaccgagagtgctgagggcgatgggcgctccgatcctcggccagtttgacccggcatttaccggtatcatgaacgaaacgatgcaaatgctccgtgaattgtttcaaacggaaaaccgctgggcctatccgattgacggcacatcaagagcggggattgaggctgttctcgcaagtgtgatagaacctggcgacagcgtgctcgttccgatatacggacgcttcggacacctgctgactgaaatcgccgagcggtacggagcggacgttcatacgatcgagtgtgaatggggaacggtcttccggcctgaagagattatcggcgagatgaaaaagatttccccgaaaatcgtcgctatggtgcacggagaaacatcaacggggcggattcatccgctgaaagaaatcggggaagcgtgccgcgcccaagatgcactctttatcgtggatgccgtggccacgattggcggatgcgccgtaaaaacggatgaatggaagattgacgcagtcatcgggggaacgcaaaaatgcctatcggtcccttccggaatggcgccgattacttataatgaccggacggccgctgtcattgccgcgcgtaaaaaggtagaacggggcattgcgacagcagctgacggtaaaatgctgtccggtcatcggccggttacgagcaactattttgatctgagccagctcgaagattattggagtgaaagaaggctgaatcaccatacagaagcgacagcaatgctttatgcgctgcgggagggtgtgcgccttgttctggaagaaggacttgaagaacggttccgcaggcatcagcgccatgaaaaagcgcttacggcgggacttgcagcaatgggccttgatttattcggcgatccggaggcgaagctgcctgtcgtcacatgtgtgaagattccgccggaagcagacggcgaatcgataaggagtatgcttttgtctcaattcggaattgaaatcgccagttcgttcggtccgctgcaggggaaaatttggagaatcggaacgatgggctacagctgcagaaaggaaaatgtgctgtttgtgctggccggacttgaagcggttctgatcagacacggagttgcagttaaagccggggaagcgctgcaggcggcccttaacatatatgatctgccggctgaaaccggtatgctgtcatgagatatgaaaacgagattgaaatcatctggacttttttcccttttccccgttatactgaatggtataaaaaatgacaaatatggaatgatcatctgtttgtctggggagaaggtaagaaatcatggcgtacatggggcgattgtcaattttaatgctgaatatgtttattgcgatgcttgggatcggattgattattccgattatgcccgcatatattaccgaattcggagcgacggggagcacgatgggtctgcttgttgcggcggcggggcttacacagcttttatttgcgcctattgccggggaaataaccgacaaatacggacggcggaaactgattattttcggcattgccgcctttgccgtgtcacaattgatcttcgcctttgccggaagcctgtggcaattgttcgcatcccgccttttgggcggaatgggcgcggcgtttttaatgccgtcaatgttcgcttacattgcggatattacgaccgaggaagaacgcgggaaaggaatggggctgttcagcgcggcgatgacgctcggtgtcgtcatcgggcccggtgtcggcggttatttggttcattacggcatgtctgtgccgttcatcgtgtccgcaagtctcgcctgcttttcaacggtgctttcatttttctttctgcccgaaacgctggggcgtgaaaagcagctggaagcccgggcaaaaacggaaaaacgtgagcatctgtttaagcaaatgtcacgcgcgctcaaatcgccgttcgcgtttatgctgattctggtttttgtgctgaacttcggaattatgaactttgaatccgttttcggcctttacgttgaccataaacacggatttaaagcctctgatattgcctttattattacggctgcgggtctcatcggcgtatttgtgcaggcggtcggcgtcagttatctcgtccgcaggttcggggaaaagcgcgtcattaacgtgacgttgatcggggctgctgcaggacttgtgtggtgccggtttgcgggttcatattgggccgtttttgccgcggcaatctttttcctgacgctgacatcgctgctccggccggccgttaatacgatgctgtcgaagctcgccggtgaccagcaggggtttgccggcgggatgaacacctcattcatcagcttagcgaatatcgccgggccgtcggccgccggttttctctttgatgtaaatatggaatttccgtatatgctgggagcggccattctcgccatcagttttctggccgcgcttggctggggcaaaaagacacagacccggccgttcacgcagcaaggataagaatcaaaagcctccgggtatccggaggctttttgctgattgtcgtttattctgcggctgtctgcatctctgaaattgcagagatgcgcatagagggaaaatcatatagcaaaaacagttgttccgtatgctcaagcatggcgcgaatggaaaccggaacaggtgtagataaagtaaaaccagctttatcgcttgacgagtctgatgaatttgatctgccggaagttgatcaaaaaagaaggcagtcaggcaggcagggacaacattgagcggcgtaaatgctgagaaggaaaaagcagggttttggaacttgctgtttcgtatgcagggggagagcattctgataaaacgggtcattgaaataatacgaactgttcagtagggggcgattggtgacaacaaggagaggttatcttataaaacctctcccggaagatgttgtgatggttctcctgcatgaattttgcagattaaaacccgcaattaggccaacacacaattatgcaagagacaatcatctaaaaaggatgtcggtaagtacaatatggtgtacggaaaaggagttgaaaatgttgtattattacccgtcattccatttgtatcagcggcaagaatttaattattatccatgggcccatcaattgactcattcagggggctccccctatgtttccgcgcgccctcctttttataattccccatgttacagagagtgcataagaagcggagcggatagttatttctgctgctatatctgcggtttctgttaaaaagaaagacttatagaagtaagtgatctttccaggatgacagtgagaccattatccagacagccattagccaacacacgaagctttattacggttcacggaggggaagcgcccctcctttttcagaaattttataaaatccccttgcgcggcctgtcagaagcggtttttggtcttgatgtgttcgactgttggtgttgacgaagaattcaagataccaggaagcagcgaaacctgtatgtatccgcgagacacaaagctttccgccgctgagcgggttcattgtcactgcgttctgtctcctgtagtagataacgagattttggggctgtcagttgaggaaaaataaaaaattcaaaacgtcgcaatcgtttaattaaaaagaagagatagaatctatctcttcggattattactgaactacaaaatggtatcgggttttccaagtggaggaatcatcatagaattcaatccaggcttctcctttagcgactgcaaatacctgaatggttttgtagtcagtacctaaagctctccatgtcacagcaggagggttataacccgtaggattaaaggaaatgcgattaccagaagtagaataattccttatctctcctacttttaaattgacgcgggtttcagactgagattgaaacaaattcttattcactttagtagagggaccggcggctgatgctgaagagttaaaaaaaggcgcgaaaacgaatgaaacaattgcaagtgataacaaagcatttttagctagtttcaacgtaaaacctccttttggtatttataggataacagtaacacttaatggaaatataacaatgaagaaattgttaaatattctttgaaatgagtgaacacatgccaagtgaattgataaatgcaaacatcatacatgtttcttacgtagataaggctgctaatcaaaagcggtttttttatgaaatcagaaaaggaaaagcagcatgactttcagggcggcgtggggaagtggttgagtcttgtgtcgctccccgctgattttcaaatgaatggcgaaaccatcaaaaaagggtcatgggtgcttgtgacaaaggttccgaggcagtttaggatgaaatcaaaaagggtgagattatcggttgcatcctgaatatcgaaaaagcctgatgatatcaatggcagcattttttgagggtttagctgaatgaatccccttaaataggatgcgggagaacacccgcatcctggtctatggctaaattttaaccgatcagccgctgcattctcagcgcgagccgcaggcgcatcgtcgtctccggatcttttaagcttttgccgagcagttcctcgcatttttctaaacgatagatcaccgtatttcgatggacgtacaggcgcttagccgtttctgaaatctggcagtgggtttccaggtaaacagacagtgtatgaagcaggctctggtcctccttttgccggtcggccaggctttggagggtggcttcgtaaaactttttcacatcttccgccggaagcaggccgagcaactccggcacgtctttggcatgatagatttgaataaactccgcgcttctggacaaatgcccggatgaaatggcgtctgaagcttcagtaaaagcgtcagggacatcgatcagcttttggcatatgtttgagatgccgaaggagacagtccgtttaaactgcgtccggacctgtttctgaaactgctccaaaaagctgatgacagacgcgtgcatttcattccagctgtctgtcgcttcaattaaaagaataccgacatttcctttaataaagagatgagggggaaacggaaaggatgacagctccccttcaagcagatcaaatacatgatcggaaacgagctgattttcggtaaagctgatcgttttctcatttcggtcgagttttccgcaaatgcacatgtatttctgatcccagcggagccggaattctttggcacggcttttgatttcttcatggccggtaaacgagcggtcgatgaaattgctgaaaaattcattgcgcgcccgtctgccgaattgtttgacggcattttctttcagcagttcaaaggaaatgacgttggccgcctgttcaattgtcaaaatcatgcctttatcagcggtctgcaccagctccggaatcaccagataaccgcagtttttttcaacattcagaatcggcaggacagaatacacctttctgtcggagagcatggaaaagcaggtgaaataaggaccggaaagggaataacagatgtttttcaataaagacgtgtcaatgggtatgctgtgggacgatgataagagttttgtatgctgatccaaaagcagcacgggaagccggagaatgtctgagagcttcttaagcagggattgcagccctttgccgctcatgatgtggtttgtaaattttttatgggcgtaaatggcctgctgcagctcatttgaacgcatatcaagaatatggctcaatgtagcattgacgatatctcccagcctgatgtcttccggcagctcaataatcggaaattcataccggtcggcaagctctgcggcatctttcggaatgacattaagatagcgcttcgttttgatccccagtcccgcgcatccccgttttgccatgaggcggattaaatctttcaacagctgcgggcggtccttcaagtggtaagccgtcgtgacgagcaattcgtttttatgtaaaaaatcagcgatgtccggcgcatccatcatgttgacgtgctgcacctccctccagccgccggatctgcctgcgattaatgcggcccgctcataagcgggaatcttcatcacatcataaatattcatcagtcaatctcctttcaggttctaaagacaaccattggttaatatgaataaaagtcatcaaaaattatagcggttttgctgatgtattacgatcatagtagcagtaaactggcaatcatagacgcatgttgtgataaaaactgacagaaaatcgtcatccttacagggaggaagataaaatggcctatgacgtaattgtaaagggtgcgaaagctgtgcgaaaaggcgggacagagcgggccgatatcgccgtcaaggacgggaaaattgcattgatcgagcccggcattgacgaaaacgcggaacaagtggtgcaggcagacggcatgtatgtgtttccgggcgcggtcgattgtcacgtgcatttcaatgaacccggacgcgaagaatgggaaggcattgaaaccggctcaaacatgcttgctgccggcggctgtacggcttattttgacatgccgcttaactgcattccttcgacggtaactgctgaaaacctgctggcaaaggcggaaatcgccgaacggaagtcagcggttgattttgcgctttggggcggtttgatgcccgggtataccgaacatatccggccgatggcagaagcgggggcaatcgggtttaaagcgtttctgtctaaatcgggaacggatgaatttcaatcagccgatgaacggactcttttaaagggaatgaaggaaatcgcggcgtgcggcaggattttggccctgcacgcagaaagcgacgccctcacccgattccttgaagccgagtacgcgctccaagggaaaattgatgcccgcgcttacgcttcctcccgtccggaagaagccgaatgcgaggctgtgcagcgggcgattgaatatgcaagagcgacgggatgcgcgcttcattttgtacatatcagcacgaaacgggccgtgctctccattcagcaggcgaaaaaagacggattggatgtcaccgttgaaacgtgtccgcactacttattattcagctttgaagacttcctcaaaaaaggggcggctgccaaatgcgctccgccgctccgctcagaggctgataaagaggaattgatcggggttttggctgaagacctgattgatatggtgtcttcggatcattctccctgtcatccggctttgaaacgcgaggataatatgttcctgtcgtggggcgggatcagcggaggccaatttacgcttctcggcatgattcaattagcgatcgatcatgggattccgtttgaacatgtggcccgatggacggccgaagcacctgccaagcgtttcggtttaacgaataaaggccggcttgaagaaggatttgacgctgattttgccattgtccggccggaaccttttaccgtcacaaaagaaacgatgttttccaaacataagcaaagcctgtatgaaggccgcacctttccataccgaattgctgcgacctacagcaaggggtgctgtgtgtatcaggatggcggtcgtaagcagagcgggtctttcggaacattcctgaagccttgtgaaataaaaaagccgattctctgatgagaatcggctttttttgtcgtttggaaagcgggtctcgtggtatctttttataaaaaggagtaaaacacattgtatgatcaaatcttgaacatattaacggcatcctggtcgcgcaagaccagtacaaaatggacggaagattgcccggccacaggccagtgcggcgtgacggctttagtcatccaagatgtttacggcggtgacattctcaaaacaaaaaccggcacaagctggcatttttataatcgaatagacggggagatatatgatttcacgagcggtcagttttcagagccgatcgtctatcagcatattctttcttccagagatgaggcattttcggacaccaatgaacatcagtaccgttacctgcaaagtgcattcagaaaaaacatggaaacggaaagagaaaaacacctgtgataaactagaatgagaggtgaaggattgtgatttatatcggactgacggggtggggggatcatgacagcatctatccgcctaaaacagcgggcccgcaaaaactgcaggcgtattcctcccattttcccatcgttgagctggacgcgagcttttacgcgatacagcccgcccgcaataacgaaagatgggtcaaagagacgccggaatcttttcaatttgtcattaaggcatttcaaggaatgacgggccatcagcgcggtgatattccctttgaatcgaaggaagaaatgtttgaggcgtttaagctgtcattatcgccgtatatagagcatggaaagcttgccatggtgctgttccaattcccgccgtggtttgactgcaagaaagaaaacgtcgcatatttaagatggtgcaggaagcagatgggcgatatcccgtgcgcgcttgaattccgcaaccgatcttggttttccccgccattttacgaacagacgctttcctttatgaaggaggaaggctggattcacagcatatgtgacgagccgcaaatcggcgagggcagcattccgaccgtcctgaaagcaacggatgaagaaaaaacgcttgtccgttttcatggacggaacaagcagggctggatcaaacctgacggcggacaaaactggcgtgaggtcagatatttataccgctataacaaacaggagctcaaagattggaaaaacaatcttcaggagctgaaaaagcagtcgcgcaatctgtatgtgctcttcaacaataactcaggcggagacgccgccgataacgggcttgagatgcttgaaatgttagatatctcatataccgggcttgctccgaagcagctcgacctattcagctagaaaagaggtttcaagacacatgtcttatcttattttgattatattgggatttatcgcgggaacggtcggcagcctgatcgggcttgggggaggaattatcatcgtgccggcgatgctctatttaagcacgatgaccccgtttttccatgacgtaacaccgcagactgccatcggcacgtcccttttggtgattatttttacgggcctgtcatcaactctggcctatatgaaatataaaaccgttgactacaaaagcggactgatcttttttatcggttccggcccgggaagcatcatcggcgcgtatttgtctaaactttttaatgcgcatacgttttccgtctggttcggactttttatgattttgatttctattacattaatgctgaaggcgaaagcaaaaccggtcaataaagcgcataaaggcatgatccggacatatgaggatgaaacgggtgagctttatacatattcgtaccgtatttttaccggtatcgccattgcctttttcgtcggtttattgggcggtcttttcggcatcggcggcggctctcttatggttccggccatgatgctgttatttttgttcccgccgaaagtggctgtggcgacgtcaatgctcatcattttcttatcctccgtgacgggttccgtgtcacatatcgcagagggccatgtcaattggctgtatgcgctgtgcctcgttccgggcgcgtggttcggcgggaaaatgggcgcgtgggtcaataagcgggtgcagacgaaaacgatcgtgcttttcatgcgggtcgtcttgattttgatcggctgtgaattgatttatcaagggatattcagctaaaaggtaggagagatggtatgttagagaaactccgtttatatcatacgaatgatttgcacagccatttcgaaaattggccgaaaatcgtacattatattgagcagaagagaaaagagcatgaaaaaaacggggaggaaacactcgtattcgacatcggcgatcatatggaccgatttcaaatgataacggaagcgaccttcggcaaagcgaatgtcgacttgttaaaccggcttgagatcaatgcggctgccgtcgggaataatgaaggaattacgctgcctcacgatgagctggcgggtttatatactcatgccgcgtttcccgtcattgtgtccaacctgtttgacgcggacggacagcggccggaatgggccgagccctacgtgatcaaaacgctgaaaaacgggatgaccgccggcatactcggggtcacggtgccgtattatcccgtctatcagaaactcggctggacggtgacggatgcggaaaaaagcattcaagaatcacttgacgatatcaagggcaaagcggacatcatcattctgctttctcatttaggcctgatcgatgaccgggccgcagcggaaaaatttcccgacatcgatgtcattcttgaatcacatacgcaccaccttcttgaggacggacaggatataaacggcgtattgcttgcatgtgcggagaaatacgggaactatgtcggctgtgtcgagctgacgatagaaagtgaatcacgaaccattgtcagcaaacaggcatctgtacagaaaatggctgattggcacggggaatctgaagatacggcggcttttctgaaagagaaagaacgggaagcggaaaacctgctctccgtacaagtcgccaatctgaatgaagaagccggcgtgaagtggtttgaggaatcgccgctcccgcttctattagccgaagcgctgaaaagctggtgcggctgtgaagtcagcatggtgaattcaggcgtcattttggggcctttacagaaggggcctgtcacaaaacttgacttgcaccgcatctgccctcatccgatcaatccggtcgccgttcgtctttcaggcagggaactccgggaaacaatcagccaggccgcctcggaacaaatggagcagctgcggattaaaggcctcggcttccgcggggaagtgatgggcaggatggtatatgccggagcggaggcagaggccggcatccttgaagacggtgtgacgcatctcctcaatgtgaaagtgaacggagaagaggtggatccggagcggatatactcggttgccgttctcgacatgtttacactcggaaagctgttcccttacatccgcgattcaaaagaaaaacaatattttatgccggagtttttaagggatctgctcgcctggaagctcgcgcggcaagcgtaatgtcaaatatccgccggccgttccatctcacccgaatgaaggtaagcgggactttttaagagcaaaaataaaatactatgtcccctcttacaagcatacattgtgatatgtaaggggggatttttcttgcctagataccggagcgctcttcgcaagagagggcctttgccttttcgatatgtgcttcttctgtcgtttgctttttttatcatatcgacggtcatcagcctctggatgatcaactcctcaatcaaaccggtgctgatgaacataggagaaatggaaaccaaacgggtggcgacagaggtcattacggaatccattgaagaatacatgtctcacagcgacaatgtgaaagatatggtcgatatgaaaacggatgaaaacggaaaagtcacaacgatggattttaatacacaaatggtcaacagcatgaaggcgaaagtgacaaagcagcttcaggctcatttgaaggaagcggagtcgaacaataagcagcatgaaacggaaaaaggcgcgaaaacggccgatgaaattatgattaacatccctttagggcaggtcacgggaaacagcgttctcggaaatctggggccgaaaatccccgtgcgctttaacctgatcggtgatgcgttaactgatgtgaaaacaaaaataaagccgtacggcattaacaatgccctgatcgatatcagtatttttgtggaaattaaagtgaaggtcattattccgtttgccagtaagacatcagtcgtcacaaataatattccggtctccattaaagcgattcaaggagaggtgccgcagttttataacggaagcggcggatcaggtgtgacgccttctgtccagctgccgagtgaaaaacagaagaaagataaataaaaacacacagccgcaatctttcctggcggctgtgtgtttactttttcctgcggatttcttttcgctcccatgcccttaaatggggatacgggtcaaaagaccattccgatctgccgttatctttatacatcccgtagtgaagatgcggcggaaattttcccgcggtgcccggcggtccgtatccggaactgccgacagagccgatcacctctccgggtttgacgatctggcctttatgcacaccttttgcaaagccgttcaggtgagcgaagtagtgatacgtgttattgatatccctgatgccgattctccagccgccgaaacggttccagcccttcatttcaacaataccgtagcaggtcgatctgacggggagtccgtaatgagcgaacagatccgttccttcgtgaatccggcgcccgccgaaaccccgtgcggcgccccatgtgctgcggtagctgtaatccgtcttcacgggaagcggaaaagcgtgctctccgagatcaaggcggccgaacgttttaaacagtgtcatgaattcggtgataatgccgaccgtctgatcacggcggtaataattccagaggccgatgcggatatggtcaagatccgttccgaatcccgctaaatactgtgcaaatgtataaaggatatcctcatcattgctgacctcggcttttccgtcgccgtcgccgtccaggccgatcccgtcaaatactttaatgctgaggggcgcctcgtccttaggatttggattttcaggcccgctccacaaatgatccggaatataaatgctgatgattcccgctttttccggcagatcctttcggttcgagcggacattttcttcatattgatcaaccgccgcaagcacataccaaggaatctgcgtgactgcttcggctttgcggtacaactgcatccgttcaccgtaaacaggagccgattgttctttcccgcttgcagccggacagaaaactgataaaaggagaagagcagataacagaactttcacaacatgatctcctttcaggattaatacaactagtttgcggcaacaatccgagaaaatgtaagtaattctcttcccttgtcgagaaatttttcctatgttaaagtgactattgaatagaaatctgcaagttttatatccatcgtgaaatagaaatttttcgcacacgaacatgaataaagggataatggagatgatggggaaatggcaaagaaagacgagcatctgagaaagccggaatggctcaaaataaagctgaacacgaatgaaaactatacgggtctgaaaaaattaatgcgtgaaaataatctgcataccgtatgtgaagaagcaaaatgcccgaacatccatgaatgctgggctgtcagacgtacggcgacgttcatgattctcggttccgtctgtacgagagcatgccgcttctgcgctgtcaaaacgggtctgccgactgagctggatctgcaggaaccggaacgcgtagctgattcggttgcactgatgaacttaaagcacgccgtcatcacggccgtggcgcgtgatgatcagaaagacggcggagcaggcgtctttgcggaaacggtccgggcgatccgcagaaaaagcccgttcacgacaattgaagtgctgccatccgatatgggcggaaattacgacaacctgaaaacattaatggatacccgtcctgatattctgaaccacaacattgaaaccgtccgccgcctgacaccgagagtccgggcccgcgcaacatatgaccgttctttggaattcttgcgccgtgcgaaagaaatgcagcctgacatcccgacgaaatcaagcattatgatcggtctcggcgaaacgaaggaagaaattattgaagtgatggacgacctgcttgcgaacaatgtcgacatcatggcgatcggccaatacctgcagccgtcgaaaaaacatttaaaagtccaaaaatattatcatccggacgaatttgccgaactgaaagaaatcgcgatgcaaaaaggcttcagccactgtgaagcaggcccgcttgtccgttcttcctatcatgcggatgaacaagtgaacgaagcgtctaaaaaacgccaggcccaagcataagataagccgaaaaaacccaaaacgccgcaggttttgggttttttgtgatggagccgtctgtgcagggaaaaagtcattcttgaataaggatcgtcagaaccgctacactggatataaaaggggaaaatttttccgtccgtccgaaccgtctcattttgcaattgatggacagaagtcaatgaattatgatagtaaagagtgataaaagaggtgaagacatgattcttattcaaaatgccgagtttgaactcgtacacgattttaaaaacggctttaatgaagaagcgttcaaagcccgctattcggacatattaaataaatatgattacattgtgggagactggggatacagtcagctgcggctcaaaggcttctttgatgaccagaatcaaaaagcaacctttgaaacgaaaatcagcacattggacgaatacatttacgaatactgcaatttcggctgcgcgtattttgttttaaaacgaatcagaaaataattgatgcagaaggggatgctgtcacgtgtattttgttgacagaaataatatcgaacaaacactccgtttttttgagacccagctggcgctgtttgacagcacgcctgcatggcagagcgaaatcgaaaaaagggcgcttgagcggatcagccatcttatgatcgaatgcattctcgatgtcggaaatgatatgattgacggctttatcatgcgcgatccggggagttatgacgacatcatggatattctgacggatgaaaaggtggtagctgaggatgaagcgaataagctcaagcagctgatctcttccagaaagcggcttgttcaggaatatcagcaagccgatcatcaggagctgtttacgctgatcacgtcaaacagggacgtgctgaaagcctttccggcccgtgtaagaacctacctggaaacagaattagggcctgtttccgcatttaaataacaacgagtgagaaaatccacaggagtgttgagtatgaaggattataaaggatatttgatagatttggacggcacaatgtacaacgggacggaaaaaatcgaagaagcgtgtgaattcgtgagaacgcttaaagcgcgcggcattccgtatttattcgtgacgaacaattcttcccggacgccgaagcaggtggcggacaagctgatgagctttgacattccggcaactgaagagcaggtcttcacgacgagcatggcgactgcgcagcatatcgcccagcagaaaaaagacgcgtcggtgtatgtgatcggcgaagaaggcatccgccaggccattgaagaaaacgggctgagcttcggagaagaaaacgcggactttgtcgttgtgggaatcgaccgcggcattacatatgaaaagttggcaacgggatgccttgcgatcagaaacggcgcccggttcatttcaacaaacggcgacgtcgccattccgactgaaagagggcttttaccagggaacggttcgctcacatccgttttgacggtgtcaacgggcgttgagcctgtctttatcggcaagcctgaatccattattatggaacaggcgatgcgtgtgctcggaacggatatttccgaaacactcatggtcggcgataactatgcaacggatattatggccggcctcaatgcgggcatggatacgctgctggttcataccggagtgacaaagcgtgagcatatggcagattacgaccggaagccgacatatgcgattgactctttaaccgaatggattgaacatctataaaaaagggacggccatgacggccgtccttattctgtatttctggcgctgtgggcaagccggcttgaagccgctgctgcgattgcgccgacgatatcatcaagaaacgtatggcattcccccgtagatttatcatttaaccgcccgagaatgccgggtttttctttgtcaatgtagccgtaattcgtaaagccgattgagccgtatatattcacgatagagaaggcgagcacctcgtcaaccccatacaggctttcatcaatcgccagaatggtctgaagcggttcagacagttttttttgttcggcgagcacatctaattctattcccgttaaaatggcgttttgcacctcgcgttttgcgatgacacggtccacattgagcctgcatacttccatcgtcaaatcaggatgatattttttctgaaggaaatacaccagctcggcaatatcgtccgtctcaaccccccgttcttttaaacgcgctctggcgacagcttccacctgattcagttgttccttttctgacatttgcttcacccaatctttttttactagtttatacaacacccttccgatgtgtacgatgtttctccacttgattcaaaggattacaatatgtattcataattccgccggcgtatgactacgatgtgaatagctctaatttttcaggcaggtgattatgatgaaaagcatcattaaagaaaagtacggcatccacgtcagacagctttccgtttatcagaaataccaatgcttccagacgcctaattccttctttcttattattcccgtttccgggttttcgcaatcagagctgacggagctttactacatgagtcagtatttacaagaacaaagtgacccatacgtttcagtgtttatctttacgaaggaaggagaactgacctttgaggacgaaggcaaaacgtatgcgctcttaaaagcgccgatccccgtcgcaaaccggtcgttctctgtcggaggggagcttgccgaatttcacagaaaagggcggggttttccgtacgaagtgaaagaagcgggcaggatcggccaatggaaggacttatggggaaaacgggtggatcagctggaatcattctggatgcagaaaattcatatgtctccgcttgaaccgttcgaaaagaaaatgatcgaagcatttccttattattcaggcttagcggaaaatgcgattcaatatttagtggatacggagctggatgacaatcccggcgcagaagactcggggacaatctgccatcagcggatggaacgggatacctggtcggaggaatcattgatccgcattccgggcgattgggtattcgaccatgccgcccgtgatattgcggaatatatgcgcagcacatatttgtatcatcgtgacgacttgcttaacgaagggtttttgtttttgcaggaatatgagcaagttacgccgttatcctccttttccaagcgcctgttttacagccgcctgctgtttccgcttcatttctttgagacggtggagagttattacatttctcatgattctgaaaaacagttttacgaagagcagcttgactacattcttgccgactgcacccgctatgaacagtttttacagacatgtcacgacatgatgaatgtcaggtcggcgcaggtttttgtcccgcctgtggcgtggctcggaaaaggaatcagttcgtaagaaaatataacgtaaaaatatttagaaaatagggaatcttgtcatatcaatgtgttaagcgttttcatggccgtagaaacaatattcagccgcttgtcaaaacaaatgcgggcttatataatatttgtaacttaaatgtctgtgaagggttaacaattgtccttttctagtggacaaaaggaagaaaggtggagtttctctttggaagcgattcgtattggactgttaggactgggaaccgtgggaagcggagtcgtcaaaattatacaagatcatcaggataagcttatgcaccaggtcggctgtccggtgacgattaaaaaagtgctggttaaagatattgataaaaaacgagacgcagacctgccgaaagaagtgctgacgacagaagtctatgatgtgatcgatgaccctgaggtcgacgtgattattgaagtcatcggcggtgtcgaacagacgaagcaatatcttcttgatgccttgaaagcgaaaaaacatgttgtgaccgcaaataaagatctgatcgccgtatacgggtcagagcttttagccgccgcaaaggaaaatggctgtgacttgtattatgaagcgagtgtcgccggcggaatcccgattttacgcacgctcgaagaaggcctttcctctgaccggatcacaaaaatgatgggaatcgtcaacggaacgacgaacttcatcttaacgaaaatgattaaagaaaaaagcccgtatgaagaagtgctgaaggaagcgcaggatctcggattcgcggaagcggacccgaccgccgatgtagaaggactcgatgccgcacgcaagatggcgattttagcccgtctcggcttctctatgaacgtcgatctggacgatgtcaaggtaaaaggaatttcccggattacggatgaagacatcagcttcagcaaacggctcggctatacgatgaagctgatcggcatcgcccagcgtgatgacaataaaatcgaagtcagcgttcagccgacactgctcccggatcatcatccgctctctgccgtgcataacgagtttaatgccgtttacgtgtacggagaagccgtaggcgaaacgatgttttacggcccggagccggaagcatgccgactgcgacatcagtcgtttccgatctggtcgcggtcatgaaaaacatgcgtctcggcgtaaacggaaacagctttgtcgccccgcagtttgaaagaaatctgaagcagccgtctgatatctacgcccagcagtttttaagaattcatgtcaaagaccaggtgggctctttttcaaaaatcacatcggccttctcagagcgcggcgtcagctttgaaaaaattctgcagctgccgataaaaggacatgacgatctcgcggaaatcgtcatcgtcacgcatcatacatcggaagaagatttcagtgacattctgcaaaacttaaatgatctagaagttgtacaagaagtaaaaagcacatatcgtgtagaagggaacggttggagctaatgtggaaaggactcatccatcaatataaagaatttctgccggtgacggatcggacgccggccctgacattgcatgaaggcaacacgccgctgattcacctcccgaagctttctgaaaagctcggaattgaactgcatgtgaaaacagaaggcgttaatccgacgggatcttttaaagaccgcggcatggtcatggcggtcgccaaagcgaaagaagaaggcaatgataccatcatgtgcgcctcaacaggcaacacatccgctgcggctgccgcatacgcggcgagagccggcatgaaatgcatcgtcatcatcccggacgggaaaatcgccttcggaaagcttgcgcaggccgtcatgtacggtgcggaaatcatcgcgattgacggaaactttgacgacgcgctggccatcgtccggtcgatttgtgaaaaatcaccgattgcattagtgaattcagtaaacccttaccggattgaagggcaaaaaacagcggcctttgaagtatgcgaacagctcggcgaagcgccggacattctggcgatcccggtaggaaatgccgggaatatcacggcctactggaaagggttcaaagaatatcatgagaaaaacggcaccggacttccgaagatgcgcggttttgaagcggaaggttctgcggctatcgtccgcggcgaagtcattaaaaatccagaaaccgttgcgacggcaatccggatcgggaatcctgccagctgggacaaagccgtgctcgctgcggaagaatcagccggaaaaattgatgaagtcacagatggagaaatccttcacgcttatcagctgattgcccgtgaagaaggcgtatttgccgagccgggctcctgtgcatccatcgccggcgttttgaaacaggtgaaatccggtgaaattccaaaaggaagcaaggttgtcgcagttttgaccggaaacggcctgaaagatccgaatacggctgtggacgtatctgacataaaaccgatcacgctgccgacagatgaggacagtattctggaatacttaaatggagcggcgcgtgtatgaatgaggcggagatgctgttttccattacggttccgggaagcaccgccaacttaggacctgggtttgattccatcggaatggcgctcagcagatatttgaagctttcggttttccgaaacgatgaatggcagttctcggcggaaaccgaaactgtcgcgggcatccctcaaggaacggacaacctcatctaccaagtcgccaaacggacggctgaccgctatcagaaagagctgccgcccgcccatgtcaaagtttggagtgacatcccccttgcgcggggtctcggaagcagcgcggccgctatcgtcgccgccattgagcttgcggatgagttatgcggcctgcagctgtcggaaagcgacaagctgcacttagccagtcttgaagaggggcaccctgataatgccgctgcttcccttgcaggagggcttgtaatcggccttcacgaagaagatgaaacacatatcgtgcgtgttgccgaagcggatatcgatgttgtggcagtgattccgttttacgaagttctgaccagggacgcaagagacgtgctcccgaaagagctgccgtaccgacgcgccgttaaagcaagcgccgtcagcaaccttctcgttgctgcgatcatgtcaaatgactgggcgctcgccgggaaaatgatgagaaaagacatcctccatcagccgtaccgcgccatgcttgttcctgagctttcaaaggtggaacacgcggccgaaatgaaaggcgcttacggaacggcgctgagcggagcgggaccgacgattcttgtcctgattgaaaaaggaaagggagaagagctgagaaaacagctttctgagcatttccctcactgtgagattgcggcgcttaccgtcccgtcagaaggaagcgtaattgaacggaatcctttagagcaggtgaaaagtgtataatgataaaaaagcgttcttcccatcagagaaggacgctttctttttctggagaaggatttttatttagggaagcgaaataaaaaagaaaaggaggagatacgattgaaaaaactcataaccgaggaggacattgcgtcactcgtatccgtgacagacccgcaatatgcccctgacggcagaagagccgcttacgtccggacaacagtcaatcataagcgtgattcctattcctcagccattatggtatatgacacagaatccggcatctcaaacccgtggactttcggggacgataaaaatacaagtccgcggtggtcgcctgacggtcggcgcctcgcctttgtttctgacagggaggacggcatccctcagctgtacatcatcgacgctgccggcggagaggcggaacaggctgccgatattccttggggcgtatcagatccgatatgggcgcccgacggcagatccgtgcttgtgtccgtcagtctgacatcagcggagcgcgccgatgagaaagaaaaaaagaagcatgacgagtatgagccggttgagattcaatcattaacatataaacgtgacgggaagggcctgctgaacggaagccggacacagcttgtgctgattcatcttgaaacgggggagattcagcagctgacagatcatgaagctgatcattatggcgcggccttttcaccggatggcaggcagcttgcgtttaccgccaatttatgcgagccgggtgacgccggaaagccgagcgatgtctatctgatgaatctggcggacggaagcctgaagcagattacgccgcaccgcggttctttcggttcctgcgtgttttcaccggacggttcttatatcgcgatgctgggccatgagaatgaatttcgcaatgcgactttagagaaagcgtggctgtacgacgtgaaaactgagcggctgtcctgcctgaccgacatgctggatgttcatttgagcgatgcgctgattgcggattcaatcataggaggagtgacgccccggccggtatggacaaacgacgggcagggcttttacgttctcgggagcgagcagggaagcaccggtatttattatatctcgattgacggcctcgtatatccgatccgattagaagaagagtacgtgaacggttttgcttttcatcctgatcagaaaagctgtatcgctgtcattgccaaacccgcacagccttccgagctttacagcatttcacttgaaaatggggaagagaggcaattgacattttacaatgatcggtttatagaggagcgtatcatatccgtgccggaaaagctgcaatatgaaacaaaggacgggctgacggtaaacggctggtttttaaagccttccgtttttgaagaggatcaaacatatccctcattctatacatacacggcgggcctcacatgatgtacggccatacgtattttcacgaattccaagtgctggccgcacaaggatatgctgtcgtgtatgtcaacccgagaggaagccacggctacggacaggattttgtcaatcgtgtcaggggtgattacggaggcggagattaccgtgatgtcatgcaggcggtggatgaagccgttcaggcgtatccgtttttagacagcggccgtctcggtgtgacgggcggaagctacggagggtttatgacgaattggattgtcggacagacaggccgttttaaagcagccgtcacgcagcgctccatttcaaattggttcagcttccacggtgtcagcgatatcggcttcttttttaccgactggcagctcggacatgatttgtttgaggaagcggataagctttgggatcgttctcctgtaaaatatgcatcccgcgtttcgacgccgcttttgatcctgcacggtgagcgagatgaccgctgtccgatagagcaggcggagcagctctttaccgcgttgaagaaactgaacaaaacgacgtcgttcatccgatttccgaaagctacgcatgagctgtcgagaagcggccatcccgaacagcggatgaaacgcatccgttatatttgttcatggtttgatgactatttgtaaaaataaaaaaaccaggctgtcatgcagcctggttttatgattaaaatacttgttctacttcaacgacacccggtacttcttcaagaagggcgcgttcaattccggctttcagcgtaatcgttgaacttgggcagctgccgcatgcgccaaggaggcgaagctttacaatgccttcgtctacatcaacaagctcacagtcaccgccgtcacgaagcagaaacggacgtaatttatccaatacttcctgtacttgctctttcatttcaacctcagtcatgagattcgctcctttcatatacataaaaccattatattcacagtaacggtaaaaatctaatgtttggtttgcaaagctgctttctccattatagcatatttaaacttgaacataaaaaccgttttttatacaaaagctgccccgtcctttgtatactggtgtaaaggggatgatatacatgacaaagccggttacgctcagtgtttacggcgctgaaacgctttgcgcaagctgcgtgaatatgccgagcgccaaagatacgtttgaatggctggaggcggcgctgaaacggaaatacccggagcagccttttaacatgcggtatattgatattgaggcaccgcctcagcaaaaggagacagaagagcttgcggagcgcatcaagaacgatgaatttttctatccgctcgtgctggtggaggatgtcattgtgggggaagggaatccgcatttaaaagatatatatgaagaaatggaaaagcgcggctatgtggcgggctcttaaaaatggccgctgatcgcaatcagcggcttttttcttatcagccgttatgatgcttgtacatccataaaaggcctgattttaataaacggggcacacgcccgatgagcggacggtcgttgacaagaccgaagcccgctttttttccgagtgaaccgaggacgcctttcagcttaaattgcggcattgtttccggcagctcttcattgttccagcgtttcaggaggatctgcacaatttgttccgcctgcgcttcagccagctgggcgctcggcgcatgcggcaggctcgcgcaatcaccgacgacgtaaacatgctcatcgcccggaagattgtgatgcggtgttaaaacgatgcggccttgcgggtctttttcagcgtccagttctctgacggctttattcggctgaattcccgccgtccacacgatggcatcggccggtattccttcatcatgattataaacgatgccgtcttccacttttgtaatattcgcattattgataatggtgacgccgtgttcttcaaaccatttctgaacgtacttgctgagtcttttcggaaagcttgataaaatcaggtcgccccggtcaaataacataatcttcagatcgtcacggctctctcttaattcactggcaagctccacgccgcttaatcccgctccgacgatagcgacagatgcattggcgccgaggttgttcagcttttgataggcttcgcgtgactgatcaatggtctgaatgctgtaagtatgttccggcgcgccgggcacgttatgatacttatcctcacagcccagtccgatcaccgcgtcatcgtaagaaatcggttcgcggtcatgaaacagaacctgtttgtttttcgtgtcgatggaagccacctcaccgtattgaacatccagattcggatgctcaggaaaagacaccctgatatgatgatcagaaatcgtgccggctgcgagcgcataatattctgtttttaagcagtgatacgggtttctgtcaatcagcgtgatggatacatctgacggaagctggttcggcagtaagcggtgcagcacccgcatgtttccgtaacccccgccgatcaagaccaattttttcataatgattccccttttgcccgaaaaatatggtagtcaatattgttacaaaataacgaactatgtaaaataacatctagaattatatcgaatttgatctaaaaccacaataatagttttaaaataacctacaaattgaccagaaaacacgcaatagtaaaacctttaacctgaattaatatgttacgataacattgagcgtgaaaccggatctttgacgaatagaggaaattccgttaggataaggtacatatgtgaggtgaaaccgcatgaatccgatgattgaattctgtgtcagcaatttagcgcgcggttcccaggaagcacttgagatcttagagaaggatccgaacttggacgtgcttgagtacggctgtttaagctactgcggaaaatgcatggagtccctgttcgccctggttaacggcgaagtggtcacggggggcacgcctgctgagttggttgacaacatatatacattcatagaagaaaatccgatgttttaatcagaggctccgaacggggtctcttttttattgcgcccgggttttggcaaaataaaaaatttgtagacagcaaaaataaatattgttatcttaataaagactttttttaaataaaattttagaggtggattcattgaatatcgtttgggggctgctcggggcagttgctatattagccattgcttttttgttatcagagaagaaaagcaaaattaacctgcgaaccgtcattgtgggtttatgtttacaaatggccttcggattcatcgtattaaagtgggacgccggccgggccgtatttttatggttctcaagccgtgtgcagcttctcattgattatgcgaacgaaggcatcagctttatttttggcccgctgttaaaagtgggcagcagcccggctttcgcgctgagcgttctgccggtcattatctttttctcagcgctgattgccgttttgtatcacttgaaaatcatgcagctcatctttcgcgtcatcggaggcggactgtcaaaacttcttgggacaagcagaacggaatcgcttgcggcggctgcgaatatttttgtcggacagtctgaatcaccgcttgccattaaaccgctgattgcgggattgacccgttccgagctgtttacgattatgacgagcggcctttcggctgtagcgggttcgacgcttttcggttacgccctgttaggcattccgattgaatacctgctggcggccagctttatggcggctcccgccggtctcgtgttcggaaaaatgttaatacctgaaacagaaaaaacgcagacgataaaaggcgattttaatatggacgaagaaggcgaaggcgccgctaatgtgattgatgcagcggcaaaaggcgcatccacgggccttcagattgctctgaatgtcggcgccatgcttcttgcgtttgtcgcgctcatcgccgtagtgaacggaattctcggcggaatcggcggctggttcggtttcaaacatattacattagaatccattctcggttacgtgttttcaccgatcgcatttgtaatcggcgttccttggcatgaggcgctcggagcgggaagctatatcggacagaaacttgtgctgaatgagtttgtcgcttattcaaacttcggtccgcatattgcggacttttctaaaaaaacgtctacgattatcagctttgcgctgtgcggatttgccaacttctcttcgattgcgattatgctcggcacactgggcggtttggccccaagccgccgttcggacattgcgcgcctcggattaagagcggttattgcgggaacactcgcaaaccttctcagcgcggcgattgccggcatgtttatttagtaaacgataaaagctccctgcatatgcagggagcttttatgtatgaaaaacgggggatatttgtattgtgtccgaggggaagagcttttatactaagtaaaagaaaaaaagttggaggccgatatgaattcattccgttttaccaagatgcacggtcttggaaacagttatatatatgtaaatcaatttgaagaacagctgccggaagaacggctggctgagattgccgttaaagtgtccagcattcacacgggcatcggctctgacggaatgatcctcatctgtccgtcagaaaaagcgccggtcaaaatgcggatttttaataatgacggctcagaagggaaaaattgcggcaacggccttcgctgtgtggcaaagtatgcatacgaacataagctgacagaagaaacgtcctttttcattgagacgctttcaggccttgtgaaagcagatattacggaagaaaacgggattgtgcgtgaagtcgccgtcgatatgggcgaaccgcgcctcaccaaaaaagagctgccgatgctcggcaatgaagatgaacggacgatcgatgaaacctttgtttttggagaaacggagctttccggaacagccgtatcaatgggaaacccccatattgtttttccggttgcggatattaatcaagcgcctcttacaacgctcggtcccgtcattgaaaaagacccgagatttccggaaggcgtcaatgtcgaatttgtggaaaccgtcagcgccgatgaacttcatttccgcgtatgggaacgcggctccggcattacacaggcttgcggaacgggcgcctgtgcggcggctgttgcatccgtattgaacggtgtttccgaacgaaaccgggatatcaccgttcatttagcggggggcgatcttgtgattaattggcaggacaacgggcacgtgctgatgacgggacccgccgaaaccgtatgcagcggcgtctattatttgtaaacagctcgtttgagaaatacgctcctcaaggtttataatagatatcagcatccgtttttaaaaaaggaggtctacttatgagtgttccagtaactattactgaagcagcggctttgcatataaaagatatgatgaaagagcatgaagaagaaaacgcgtttctccgtgtgggcgtaaaaggcggcggctgcagcggcctgtcttacggaatgggatttgagcacgaaaaaggcgaaaaagacagcatgtttgaacagcacgggatcaccgttttggttgacagcgaaagccttgatattatgaccggcacgatcattgacttcaaacagtccatgatgggcggcggtttcaccattgacaacccgaatgccatcgcttcctgcggctgcggatcttctttccgcacggccaaaaacgccggtacgccggaagagtgctaagggtcagcccgccattctcaggatgaaaaaataggacgcctttcttttcgatggcgcttgcaccattgttaaaaaaggcgtttatctgtttaataaaagcaaaacccgctcaacagaagcgggttttgctttttcaaagaggttattcaattgtatgtttcatcgcattgtacatatttgccgtatgttcatcggctttatcccgtgacatgcgcagccgttccgctgaagaaccgtaaccgatttctagtttgccctctttcagtcctttaaaaatcccatcagcgaattcatccagcggttctccttgagtatgcagccctgctccgcctaaatctgtatttaccgccggaggcgcaacttcaatcacttctacagatgaatcagaaagctgatgtctcagactcattgtaaatgaatgaagcgccgctttcgttgctgaatagatcggtgcaatagcaagcggtgtaaaagccaatcccgaagagacgttaatgacagccgcatcttcttttccggcaaaaaacggagcgaacagcatagacaggtggaagggagcttcaatgttcgttgtgatttctttattaaaatagtcccaattgtccttcgcatccgctttcagcacatgaaaacgatgttgaatccccgcgttgtttactaacacattcacttccggataattttctttcacccaatcaaacagtgatacacgttcagatggaatgctcaaatcactgacataggtaataagatccgggaatgtttcctttgctttttgaagagcgtgcttacgccgtccggtcacgatgactttatttcccgcttttaaaaaccgttctgcgaaagccaatcctattccggcatttccgcctgtaatcagtattgtatttcccgtcagtttcatattaactcctcttttccgattgtttttacttcaacaaacttacgtctcttgaacagagcttttgatataagcctttgtcattgacgacatttcatccagtactgaccgcttgtgtctcctcatcatgtcaagccggagtttaataggactctctccttcaattacccaatcaatatattgcttaaagcctttgatggtcatgcgggtattttttaaacaaatcacgatatcaaggagcggcatttgatctgctgaaaataaccgccggctggcttcatcacgttcaatcagcggcagcagtccctttttttcataataacgtaacgttgattctgtcatattacactttgctgctgcttcacgaattgaacaacatgtcttcgaaagacctccaacagtattttttccttgtcactgggtgatgatacgacttaaaccatgttttaagtcaataaaaaaaatgtgatgaattcagacatatgtcacaaaaggaaatgggcagattttcaataggtttaggagtgacggccttcacaaaaatcctcaaatcaacggttcaaatcatactatttgcaaattcggaaaaaaataaagggtatatagaatcaaaaaatctggaagatgtgctcttagtcaacacgttctaaagtcatatttttcgaaaggatattgattttttgataggaataaactaaattgtaaaagtatagaatagttaatttattttgtaagaaaaggatgataatatgataggtcaattgagcaataaaaaaatatttttaagttcttttttcatcattttgatctgttcattactcttccaattcagtatttccgataaagttctgcagtcgtattattcttccgtcggagaaagtacctacgatatcggggagaaaagtgttcgtacgattgtcatgtttctgcaagggtttatgatcttcacaacttttgtggaaattctgataggcggatttctattattcgttgccgcttttattctcggtacaaaaaaaccgaaaaaaatatatttgcttctatatacactgacttctttaatctcggcatttaaaatgttgattctttcagttgttaactacttaacggctgattcctcgcttatatattctgccggcggcaccagcttgagtctgcagctgctggatccatttctgctcatatcaattgcggctctttatgctgccgcaggaaaactgaccgatctcagtaaaggcaagagaatcattttgactggatgttttgttttattaaaactctttactattttctttaattattttatggcggataaaatttagctcgggagagagtcaattaagctgaattttattataaattaaaaaaacagagtagggagatgttatgatgaacttagtaaaatctaataaaaagtctttcattttgtttggcgtggctcttgctgcagcaacattggtttatgcactattattaacgggaactgaattaaacgtggcggcggctcatgcattctcagccaatgctgaattagcttcgactctgggcatctctacagcagcagctaaaaaagcaattgatattattgatgcggcatcaacaattgcttctatcatttctctcatcggtatcgttacaggcgcaggcgcgatttcttatgcaatcgttgcaacagcaaaaacaatgattaagaaatacggcaaaaaatacgcagctgcttggtaaaatcgaccaataaataattgctctttttgtacaagctgcaaaaagagcctctctcccaaatacatatgtaaggattgaaagtatgatagtcaaacaaattgcggctcttatcaaatataataccctgtcatcgtttcgaaaaagaaaggaagattggggcattcctcaactcaacagcaaactgctgtctgccattattatttctctgttatgtttatatctcgttttcctgggatgcggtgttgtattcgggacaaaactgattcagctgcccctcagcgcatgggggcaatttgttttaatcgccgtttcacttgagcagcttttttgggctgccggcttctttaaagaacatcacaatgcctttctgctggatacgcgcaaggtcattcatcaattaaaaaaggtgcgttttttacagctgttttctgtttttgccggccaggcgatcaaaaaaaccattttcgtatggtatctttttgtttttccggtctttttgtttttatcaagcgcaggcatgaccgggtctgcggcgatcatcgtatttttcttgggcttcgtttattttcttctcaatttatttttatctatgctgttttcttatgttgtttatcttcttacaaatatatggagcaaattgttttacttgaaaatcctgaaaggcattttattcagcgtcagcctgctggttccgcttgcagtcgggtatgccgtttatcttctcgtgtttggggagtataccgcaaaggatatttcaagctttacggagtcaccggctttccggaacatcctcatgaatacgccgtatgtatggttagcattccgctcacattccgtgctcgttttcgctgcggtgtttgcggccgccgtccttttaacggcggggatgtttaaactgtggtcggccacgctgaagaaaatggaccttattccttatatgtttttgacaaacgctgattttgcgccaaagctgaaattatatagaaataacaaaatatttcatgccgtttttcaaaaggatctgctgtttttatcgagaattgacgggttttttatcaggaacttcggcagtatgctgtatttgttcatgctgtttttaggtttttgtattccgcttctatcgcatcactttatcgggtattcggcagccgccatcgtgtctgcggcggttatcattgcgaacttttcgtatcagctcgtcggagatgcgctcaaaacagtattatcagttgacggggaaataaaaaatcagcatctgtttcaccggaatatcaaacatgcgtggcagctggtgtttccgaaagtatgtatttataatctcgccgctcttatctattcgttcatcatcaccattttgattacggtgttttttccgtcttccgcggcgctgacgatttacctgtttattgtgtttttatgttcgggttttttatacagtctcgtccagatttcaagcaccgccctgtatcctaagaaaaactgggagcatctgtacgaaattggagaagcggggaaagcaaagacgtataacaacttatacagttctttcattttcattgtgtcgcttcaaatcgctgcgatcacgtcctattttatctataaaaagccggaacttgaaacgatgcttattcattctgcatcaggtatttttgtcctgttcacactattaaactatggagtcatgtttctgtttcttcgcagaatcaatatggcggaaaggtttgcgaacaatgattaaattagtgaatatacaaaaaaactatagtgaaaaacaggtattgaaagatatttcgtttgaggtgaaaaaaggctcaatctatgctttgctggggactaatggagtcgggaaaacaacgactttgaaaatcatttcgggcctgcttaaaccgacttcaggccgcgtcatgattgacggcaaggaactggattcagaagagggggggcaaatatcggctgatatcggttttgtgcccgaccatgcttttttatatgattacttaacgggagtcgaatacttgcgttttacagcggaaatgtttcaagttccgtctcagcggacaaatgattatataaagaatatgttggagacgctgaagctttctcaagacggaaatcagctgattaaaacttattcacatggaatgaaacaaaaattatcaattgcggcagcgctcattcatcagccaaagatattaattcttgacgagccgctgacgggcattgatttaatcagcggtaaaacgatacggacgttattaaaggagtacgtcaagcagggaaatacagtcctgttatcgactcacctgctggagctggcgcattcgctgtgcgatacgatcggtattatacatgaaggcgtttttgcggcggagtatcagtcatccgagcattcattagaagagattgaagaattggctgagcgtatctatacatgatgaaccgcatgttgccggcaatcagaacgtccgccattccgttaaccgcgtcagtgctgtttttttcaggcggtgtgatcgctgcgtttttttccgatcactttgtttcatcagcgtcttacaacggctcgtcaggcgcggttgaactgctgaaaaacaatgcaatcgcttgtctgtttttagccgcgggtttttttacctttgggttgacctcaatcttttatttattcaccaacgggtttattttaagcggctctattatagaaaatctgcatagcggggttcctttttatcagatttttttactgctaattcctcatggtatatttgaagttcctgcgttattattaagtggcgccattggttttaagggcgttgaattggtcatcaggctgtgtttttctaaggaaaaaaagataatggtttcaatgttcaggcatattggaatattggtgctgcttattatttgtctgctgatcgccgctgccgttattgaagcttacatcacaccaatttttaagtaaaaggggcagaaatcatatgagaagtaaattatcattaatcggtgtgccgattgttatgattatcggttatatcatttctttatcctttgagtggctgtttcctgttcttacttttggggtggcaggactatatctctttatatttgctccggtgcaaaataaattcattcgttacatctttttgtttatttttgtgattaatctgttagccagtgcggctctttatttcggtatttaataaaaaaatgacattcaatatgaatgtcatttttttttatcttcgagcggctctgctgcatgttaaaatctgtcgccgttgaaaatagagttttttacgattacatagtcgacattacggatggcttcgagtgtattgccgccggcgtaagagatggaagattgcagatcctgctccatttcaaccagcgtgtcctgcaaagaccctttatgttcgacatgcatttttttgccctcgacgtttttcttttcgcctttttgaaattcagaagcggagccgaaatattctttgtacagctttccgtcgatttcgatcgtttgtcccggtgattcttcgtggccggcgaataatgatccgatcatgaccatagacgcgccgaatcggatggatttcgcgatatcgccgtgcgtgcggatgccgccgtcagcaatgatcggtttgctcgccgcttttgcgcaccagcgaagcgcggctaattgccacccgccggttccgaagccggttttaatttttgtgatgcagactttcccggggccgattcccacttttgtcgcgtcagcgcccgcgcgttccagctcccttacggcttcaggcgtcccgacattccctgcaatgacaaagctttccgggacatgttctttaataaattcaatcatgctgatcacggcattggaatggccgtgcgcgatatcaatggtaatataatccggcaccagctcctgttctttcagctcccggatgaattcatagtcattttccttcacgccgacactgatggaagaaatcagtccgcgcgctttcatatcccggacaaaagccagacgtttttccggctcgaagcggtgcatgatataaaaatacccgttttccgcgagccaggccgcgatgttttcatctataatcgtctgcatgttggccggtacgaccggaagtttaaacgtgtgtccgcccaacgtaactgatgtatcacattcagatcggctttcaacaatgcattttgcaggaatcagctgaatatcttcgtaatcaaatacattttccatatataacacccctaaaagcgaataatatatttaaataaaattaaaatgttcgtctttttataatgtactttgttttgtcaggaatgtcaaatgatttcatgctgcctcatatgcggtcagcttgtcatccatttgcagtttggttatcatagtagtattggttgttgtaagacatttgttacgatagatagatttgcagaagaagggaggggccggtatggaacaaaaacagcccgggcacagcccgaaagcccagaaaattcaggaccggattattttaggcacgatttgggtcgtgtcggcgcttgtcattgcgctcgttgtcggaaccgtcatgaattatatttggatgtttaaataaaaaagagtctgtgccggtatgacacagactcttttttatattatttttcaaacatgcttgtagaatgcagtggctggacgcgcgctttcgggtccatgtaagccttcgcgttgttcacggctgtcggagcttcgccgaaaccgctggcgatcagcttgactttgccttcatatgtgcagatatctccggcggcaaagaagccttcaatattcgtttccatcgtgcttttgacgacgatggaatttttctcgatatcaagaccccagtttttaatcgggccgagagaagaaacaaagccgtagtttacgatcaggtcatcaatttcaatgatttctttacggtcgcctttcacttcttcgagaacgagctgttcgatccggtcttcaccgacaagttcagcgggaacaaacggtgtcagcacgttgactttagaattatgcaggttttcgacactgtgctcatgcgcgcggaatttatcacggcggtggatgatgctgacttctttggcaatcggctcaagcatgagcgcccagtcaacagcggaatcgccgccgcccagaacggcaacgcgtctgcctgcgaattgattgaggtcgtcaatgaagtagtgcaggtttttgccttcatattgttccgctgattccagctcaagctttctcggcttaaatgcgccgtttcccgcggtgataatgaccgtttttgaataatgcgtttctgaattcgtgacaagcttaaacacaccgtccgcctgtttttcaacagattcaacggcctgctctaagcagatggtctgatcgaactttgccatttgctcttttaagttgttcacaagttcctgggcgcggattttcgggaatccggctacatcataaatatatttttcagggtacagcgcgctgagctggccgccaagctgaggcaggctctcgatgattttgacgctcgcctgtctcattcccccgtaaaaagcggtaaacaggccgaccggaccgccgccgatgaccgtaatatcataaacctttgaatcctcttgcataccaaattgcctcctaattgaaaattgttattaattataacatacaatttgaaaggatgacgagtgccgaaaaccgcccggccgcttcattcttgaaaaaaattgcggccgccgctaagatggggacaaattccaatctgttttttcctgaatgttttccgattcttccggatagtatggtgatatgcagacatgtgcggttttctaaaaaattttatatttcatttcataaaatcccgccaataagctgaagctaatacaaatgttgatttgattatgcgtctaacagcaaaaaaaagaaggtggatgtgatggcattgaataaacccaaaatcgtggttttaggtgcaggttatggtggattaatgacagtaacaaggcttccgaagcatatcggggcaaatgacgccgacattactttggtcaataaacacaattatcattatgaaacgacatggatgcatgaagcgagcgcaggaacgctgcatcatgaccgctgcagatatcaaataaaagatgtaatcaatgaatcacgggtcaaatttgtgcaggataccgtaaaagcgatagatgtgcaaaataaaaaggtgacgctttcacaaggggacatcccttatgattatctcgtcatcgggcttggcgccgtccctgaaacattcgggattaaaggtttaaaagaattcgcttttccgatcgcgaatattaatacgtcgcgccagctgaaagaccatattgagctccaatttgcgacatacaatacggaggccgaaaaacgccctgaccgcttaaccatcgttgtcggcggagcgggctttacgggaattgaatttctcggtgaacttgcgaaccgcaagccggagttatgcagatattatgatatagatgaaagtctcgtccggatcgtctgtgtcgaggccgccccgacggttttgccgggatttgatccggagcttgtcgattacgccgttcaataccttgagagcaaaggcgttgaatttaaaatcggcaccgcggttcaagaatgccgcgcagacggtgtcacagtcggcaagaaagatgaagagccggaagaaatcaaatcgcagaccgttgtctgggccgcgggtgtgcgcggacatccgatcgtggaggaagcgggttttgaaaatatgcgcggccgtgtcaaagtcaaccctgatcttcgggcgccgggacatgatgacgtttttattctcggcgacagctcgctctttatcaatgaagagacggaacggccgtacccgccgactgctcagatcgcgatgcagcaaggagaaacggtcgccaaaaatctgggcggtttgataaaaggaggccagcttgaagagttcaagcctgacattaaaggaacggtcgcctccctcggtgagcataacgccgtcggagtcgtatacggcaggaagcttaaaggcacgccggcgtcctttatgaaaaaggtcattgataaccgctcgctctttatgatcggcgggctgggcctgacgctgaaaaaagggaagtttaaattcttctgaaaacccgcagccgcgggttttctcttcttttaaaaaagagcgctataaaaagcatgtaaaagaaaaaaaagaatgtttccgcttacatgagttgttatgttacatattctgacttggtgcttgacaagtaaatatgatatattatcagaaaattaagaaaaagggtgatccgcatgaaaacgacagcaaaaagcacggcggcgtgtccgttctgctcaggtaaagggtattttcaattgcttcttggcggctccgaaacatgtccctcctgccagggaagcggcaaagagagacgctgatttttccagacgttgacttttttaccgccccgaggtacactgaaagtgctgtagggggtggatgtttgtgattagtttgccggttgtcctgatctcaatcgtactattttttgtactgtttttcggcataggctttctgttgaacatgctgcttagaatgtcgtggattatggctgttgtctatccgattgtatgccttttcattatcagcaataaaaagatgatcagttacgtgcaggcgccgggggaatcctttcaaagcctgtttcagcgcatcatgtcattagcggttgcggatgtcgtgattttggcgggcggactggcgggagccatcatgtcaggcattgccataaaggcgctcagaaaaagaggatatcaaatgttttaaaccgctttcttattcaagaaagctttttttgtgtcacggcgctttttgtatagcacctcaccgagttgggaacaatgactcggaggagagtgatttcagattgacgataatcagacgcgtattcatgatcgtgctctttttgggcgcatgccatgcgacatacttttctataaccggtgttgaagcaaaggatctgacaaattggatgacggaacatcgcggcgccgttttgaaaaacatcggcactccgtttcaatccttacagaatcagccggaaaagaaggcatcaggcagggtaaagccgctggaagaagcttttgactgggaacgctatccgtcacaaaaagtgacggccaccggttataccgccggagcggaatctaccggaaaatctccgggtcatccgcagtacggaattacatattcaggtgtgaaggtcaaacgcgatttatattcaactgttgcggccgatccgtctgttttcccgatcgggacgattctgtttataccgaattacggttacggggttgtcgccgataccggctcaaaaattaaaggcagccgccttgacctctactttgacaccgtcaaggacgtctataacaattggggcaaaaaaacacttgaggtctacattattaaaaaagggaacggcacagtgaccgaggacgaacttgtaaagctgaacgaaacaaagtcgctgcaagtgttcagaaatcaatacaaaacggtaaaagaataaaaacgcttcagcatccgctgaagcgtttttacataaagaaataatctaaaatcaatgtcagcacaataccggtgacgccgccgaagaacacttcaatcggctgatggccgagcagttctttcagtttcttctgtttttctttctcttccgctttctgaaagtccttcgcttcgctgacaaaccgattaaagtcgatgaccagtttattaatgactgtcgcctgttcacccgcatgccgcctgacacctgtagcatcgaacatcgtaatgacggcgaaaatcgcggcgactgcaaacaggggcgagtccagtccctgttccaaagcgattccggttgacagcgcggtgacggcggcggaatgggagctcggcatgccgccggtgctcgtcacaagagaccagtcaagttttttggatacgataaattgaataggcacttttacaacttgggcaaaaataatggcggcaaaactcgccagtaaaggaaaattcataagtacatccatatgcgacatcctttctgtatctgctgattccgatcgtatcgaaaaactgcagaaaacgcccttagtttggtaaaataaaatcaatgaaaaatgttttttcattataccactttacataacaaatacccacataaggagtgtgtactcatgttttatgcatctgatcaactgcggcatcccgaaacactggtcatcggtctttttcaaaaaagcacgctgaacggatttacgaaggaattggatgataaattagacggtcatctgacccagctgttaaaggatggtgatgtgtccgccaaacgcaatcgtgtatcaaaagtataccctccggctgcgaccggtatgaaacgtatttattttatcggcctgggaagagaagcggattattcgtttgaagatacgaaagaatgctttgcacgagtatttcagcagattcatcaagataaaaaacaggaagtatccgtgttgctcgatacattcgtctccggggaagtgcctgccgccgatgccgctcatgcgctttcggaaagctgtctgcttgcggtttatgaggtgcaggattataaacataaatcgaatgagccggatcaggaactgaaatcagtctgcgccgtgaccgaagaagacctgagggaagtgcaggccggcctgaacgtcggcgcggcatacggccaagggacgaattcagcccgcacgcttgtgaatatgccgggtaatatgctgacggccactgatttggcgtcatatgccgctgagcttgcggcaaaatacgatttcgagtgtgaaattttagaaaaagatgaaatggaagagctcggcatgggcgggctgcttgccgttaacaaaggctcatccgaaccgccgaaaatgatcgttctgaagtatcagggcaaagatcagtgggaagacgtcatcggcctggtcggtaaaggaattacctttgatacgggcggatattcaattaagccgaaaaccggcatcgtcggcatgaaaagcgatatgggaggggccgcctcggtattgggcgcaatggaaattatcggcgaactccggcctgaacaaaacgtgctcgccgtcataccgtctacggacaacatgatttcgtccgatgctatgaagccggatgacgtcatcgtttcgctcagcggaaaaaccattgagatcctgaacaccgatgcggaagggcgtctcgtgcttgccgacggcatcacatacgccaagcagcacggagcctctgtccttgtagacgtcgcaacgttaacgggcggtgtcattgtcgccttaggtaacgaaatgacgggcgccatgaccaatcacgccgcgttttatgaacaggtggcggaatcggcgaaagaatccggcgagccgatctggcagcttccgattacagaaaaggataaaaaacgggtgagaaacagtcagatggctgatttgaacaattctccgggaagagaaggccacgcgattatggcgggggcattccttggtgaattcgcggaaaacacgccgtgggttcatctcgatattgcgggaaccgcgacggcgaataaagcgacatgcttcggccctgccggcgcaacaggcgtcatggcaaggacgttggctgttttgactgagcggtttacgcccgaaagataacagcatcccgctgccttgatgcagcgggttttttgatttccaaaatctttagttgactaaagcgcagaatgtatgttaactttaattatctactacattagcaaactaaaggatttttggagggactcatcaatgaatgctgttgttgtcgcagtattgcttatgctcgtcttaagcctgctgcgtgtcaatattattatagctttaatgatcggcgcgcttgccggcgggctgaccggcggcttaggcctcggagagacggtgaaggcttttacggacggtctcggcggaaatgccaccgtcgcggtcagctacgcgctgctcggagcatttgccgcggcgctgacgaagacggggcttcccgatgcaatggtggaagcgtctgtcaaactaatcggaaaaaaggaagattcgcggaaaaaagcactgtcaaaagtgttaatcgtactggttattttaatcatatcctgtttctcgcaaaacgtggtgcccgttcacattgcgtttattcctgtattgattccgccgcttttaaaaatatttaacgaacttgaaatagaccgcaggctgatcgcgtgtgtgatgacattcggactgactgcgccgtatatcgttctgcctgtcggattcggacagattttccaggggatgctgagagataatatggcgtcagccggtttaaaggtgccgctcagtgatattccgtatgctttaatcatcccgacggccgggatggtagtcggtttaattttatccgtcatcgtcttccggaaaccgaagaaatatgagacgaaggagattgccggactgtcgtcttctccttatacgaaaaaaagcattgccatcgccctgatctccattgccgtgtcgcttgccgttcagctctatctgtcacaagtgctcggagtggaaggtatgatcatgggcgcgcttgccggcttgtttacgctgtttatcagcggagtcatgaagcgcaatgaagcggataagctgatcacggacggcatgattctgatggcttttatcgggtttgtcatgcttgttgcggccggtttttcaaatgtattgaacaaaacgggcgatgtggcttccttggtcaaagcatcaacaggctttatcggtcacagtcaatcattaggcgcgctcctgatgctggtggtcggtttattaatcacgatgggaatcggatcatcatttgcaaccgtacccgtcattacgaccatatttgtcccgctgtgcgctcagctcggattcagcccgatggcgacgatcgccgtaatcggagcggccgccgcggtcggtgatgcgggttctcctgcaagtgacagtacgctcgggccgacgtcaggcctcagcgccgacggacagcaccaccacatttgggatacgtgcgtaccgacatttattttctataacattccgcttgtgatattcggctggattgccgcgcttgtcctgtaaaaaaaggctcccggaaaggggagcctttttgtatgctgagaacatcttacgccggatttctgctgaaccccgtcgctttatgaatagacctgtatacggcaggcgcgattgatgccaataacagtgctaaaacgatatcttttatgaaaaaccatatcatgtaaaaccaggccattccgtagctgatcggagcatgaagccataatttcagcgcaatatacgtataggtcgtgccaatgatataaatgacggcggtaccgatcaaagaggcccatgcataatgcaggcggccgggtttttttgttttttccagcagccatccggctgcaaatgccgccgggatgtaagcgagaataaacccgccgctctttccgataaacggcgcaaagcctgctgagaattgagcgaaaacaggcgcccccgcgagtccggccaatgcgtataccgtcattgcaatggctgcccgtctggcgccgagaagcatcgcggctaacagacaaaagaaaggctgcagcgataacggaattcccgcaacttgcaaaaaaggagccattgatgtaatgttggcgccgacggccatcagggcggcaaacatgccgatcagcgccatatcgcccgcgcgaaggttgcgttgtgtcatttgtttttcccccttacacttgtaccagattagcgtaatcgaagggtgattgattgtcaacaaagatttaatacaggtttactaaatggagggagccatatgtttttcgggaaaacgaaacaaacaaaacagtcggaacggattccgccaaatcaaaatgtcacaacgaagtttcccgtgcttcacgccggaaatgttccttattatgaagatatgtcaaaatggaatctgcaagtgtacgggcttgttgaccgtcctatgctgttaagctttaaagatatcaaagcctttccggaagccgaagtgaaaaatgatattcattgcgtcacgggctggtcccgtcttgataatatctggcagggaatacgcgccaaagacatcgctgagaaagcgggtgtgcacaaagaagcgggattcgtcattctgcacgctgaagagggctggacggccaacctgccgctttctgattttacgcgggaaacatccctgctggcatatgcgcataacggcgagccgttaacgccagagcacggctatccgctcagaggcgttttcccccatctttatttctggaaaagcgcaaaatggctgcgcggcattcagtttacaaaggaaaaccaccccggcttttgggagaaaaacggctaccatatgaggggagatccatggaagaatgagcgctttacatgggattaagcccctatccctatatagttcttaggtaccttattaaaataaggtgctttttttatatcaaaaatccattgactttgtttggcaaaaaacctattatttgaggtgtcttttgatattgaaaatcattatcaatgaggatagataaagtaattgccacaaaggggatgaacacataatggacggaaaacaaataaaccgggggttcgcgccggccggccgatacgcggttccgggcacagaagtaagagaaatgcgctcaaaaggaggccgtacgtatcgtatctttgtctcttttcctcaggaagaaccgcctgcctccggcttccccgtcatctacctgcttgatgcaaattccgtgttcggtacaatggccgaagctttgcgggtgcaaagccggcggcctgaaaaaacaggcgttgttccggcggtgattgtcggaatcggctacccgacagatcagccgttttccgccgaacggcacagtgattttacgatgccgctttctgaatcagaactgccggtgcatccgcgcggcgcggcatggcccgaacagggaggggcggaagcgtttctggagtttatagaagaagaagtaaagcccgcgatggagcgggattatccgatcgacagagacaggcagacgattttcggccattcgctgggcggtctttttgtgctgcaagtgcttttgacgaggccggacatgttccagacctatgttgcgggaagtccgtcaattcattggaacaagcgttttattcaggaaaacgcagaacgtttgtcagaccggctctctgcggaaaatcttcaagtcagtgtattgctggctgcgggagaaattgaaaaaacacataaaagcagaatcccgcagcacgcagaggcgctgtactctttattatccggatttgaagatgatggagtccgtgctgaatacagcgagtttgaaggagagggccatatttctgtcctgcccgttttaatcagcagagccctgcgtttctgcctgaatccgggagggccgcataccccgtattctcccacatgagaaaaaacaggcccttcgaactaaatgcggctgattctaattttctaattgactgcgtgttttgatttggatatgattgtcttgaatcataattgataatgataatcattatcaatatagaaagggaatgataatatggacgcattgggaatgaaagggaaaacggccgttgtcaccggcgccgctcaaggcatcggagaagcaacagcgcttgcccttgctgaacaaggcgtaaatgtggcagctatagatacaaatgaagacctgcttcccgggctaactgacagacttcggcaaaaaggcgtgcaggcgcaggggtttgccgcagatgtatctgacagtgcggctgtcaatgatatcatcgctgccgttgaacgtgacatggggcctattgaaatattggcgaacgttgcgggcgtgctgcggccgggtccggtgcaatcccttagtgatgaagattgggatcaaacattttctgttaatacgaccggcgtatttcatgtatcgcgggctgtaagccggtacatgattgagcgtcaaaaaggcgccatcgttacggtcggttcgaatgcagccggcgttccgcgtgcttccatggcggcttatgcggcgtcaaaagcggctgccgccatgtttacgaaatgcctcggactggagcttgcggcccatcatatccgctgcaacatcgtatctccgggttcaacggaaaccgacatgcagcgggcgctgtggcgggatgaaaacggagcacaggacgttatcagaggttcgcttgatacatataaaacgggaattccgcttcaaaagctggcaaagccttctgatattgcaaatgccgttttgtttctggcctctgaacaggcaagccatatcacgatgcatgatttatgcgtggatggcggcgctactttaggcgtttgatttaacgagaaggagggacaaacatgacaaatcaacatgtattgacggaagtgtctgcaaaagaggtgctggacgcttacaagcccggagcgttctttttagcttccccgaaaaggacgctccttgcagaaggtgtgtttgcaaaagtgccggatgcagacgcggagaatcagctggattcactgcctgaacgcgtaagacagacgcttcttgaggcaaagcaagccggcatcaaacatccgattgcggccggcgccattccttttgacggcagaaaagcttcccggctttttgtaccgaagaatgtccatacggcaggcccgctttcgtttgcggaatcttccgcagaaaagccgcaatccaatacatatgacatccgtcccgttccggagcctgagggctttatgagcggtgtggaacaaggcgtattcaacattacggacggcccgctcagcaaaatcgtgctgtcaaggacgcttcatctgaccgctgaaaaggatatcgacattcctcaggccgtcaagcatttggcgcagcacaacccgcgcggctatacattcgcttcggatgtgacgggaacgtcagaaacaagaaaaacgcttttcggcgcaagtcctgaactgctgctgtccaaaaacggaacatcgattctgtccaatccgctggcaggttccagacctcgcagcacagatcccgccgaggatcagagaagagcggaagaactgctgcaatcagcaaaagatctgcatgaacatgccgtagtcgtggccgccgtggccgccgccctaaaaccgttctgccgtgtgcttgatgtgccggaaaaaccgtcactcattaaaactgaggcgatgtggcacctgtccaccgaggtaaagggagagcttagtgatccgtcaacgacatcgcttgagctggccatcgctcttcatccgacgcccgctgtatgcggaacgccgacggatgcggcgagagaagcgattcaggatatagagccgtttgaccgcaatttctacacgggaatggcgggctggtgtgatgctgaaggtgacggagaatggattatcgcacttcgctgcgccgaagcggaaacaaggtctctccggctctttgcgggtgccgggattgtcgccggatcaaagccgcaggatgaactggacgagacatcggcgaaattccgcaccatgctccgggcgatggggctttaccaagatgagttgtaaaaaaggagggaacggatcgtgctgactggatttacgccatggccggaagaatgggctgaaaaataccgaaaagacggctgctggaagggtgagacgttcggaggaatgctgaaagagcgcgcggctttatacggaaatcaaactgccgtgacgtgtaaagatgtacattggacctacaaagaattagatgaaagggccgatcgtttagcggcggggctgcataagctcggaattcaaaaggaagaccgcgttgtcgttcagctgccgaatatcgctgagttttttgaagtgattttcgcgctgttccgactcggagcactgcccgttttcgcgctgccttctcatagaagcagtgagattacgtatttctgcgagtttgcagaggcgaaagcatacatcattcctgatacgcattcaggttttgattacagggcgcttgccagacaggtgaaagacaaacttccggatttggcgcatgtcattgtggccggcgaagctgaagagtttcaggaactgagcagcctgcatagagagcctgttcagctggaagaggtaagcccggcggaagtcgcttttttacagctttcaggaggcagtacggggctgtccaagctgattccgcgaacacacgacgattacatatacagtttgcgcctcagcgcggaaatatgcggcttggatcatcacagcgtttatttggccgctctgccgacagcgcataattatccgctcagctcgccgggtgtgctgggaactttatatgccggaggccgtgttgttctgtcaccgacgccgagtccggatgactgcttcccgttaattgaaaaagaacgtgtcacgattacagcgctcgtcccgccgcttgcgatggtgtggatggacgcatccggttcgcgaagtgatgatttatcaagccttcaagtgctgcaggtgggaggcgccaaattcagtgctgaggcggcccgccgcgtaaagagcgctttcggatgcacccttcagcaggttttcggaatggcggaaggattggtgaattatacgagactggatgatcctgaagagatcattgtcaatacgcaaggcagaccgatgtcaccttttgatgaggtaagggttttagacgatgacgggcgggatgtcgccccggagaagcgggacatttgtttacacgcggcccttacacgattcgcgggtattataaagcgcctgaacataatgaaagatcattcacagccgacggattttatcagaccggcgatatcgtcaaactgacggcggacggctatatcatcgttgaaggacgtgcgaaagatcaaatcaatcggggcggcgaaaagattgccgctgaagaggtggaaaatcaccttctggcccatcctgccgttcatgatgcggccatggtttcaatgccggatgattttctcggagagcggtcctgtgtgttcgtcattccgaaaggagaagcgccgaaaccgggagagctgaaagcgtttttacgggagcgcgggctggcggcatataaaattcccgaccgggttgaatttatcgcttctttcccgaaaaccggcgtcggcaaggtcagcaaaaaggaccttcgcgaaacgatcgcccaaaaattgaagcctgctgaaatcaaacaatcttaaaaaaggaagtgtttacattggctataccgtcaattcccgcatatgcgctgccgacagcgtcagatatgcctgaaaataaagtatcgtggacgctgaacccgaaacgcgcggtgcttctgatccatgacatgcagaattatttcgtcgatgcttttgagaaagggaaggctccgatcacggaggcggctcagaatatcaagaaaataaaagagcaatgcaaagcgctcggcattccggtggtgtacaccgcgcagccgggcagccaagacccggcggaccgcgcgctgctgacggatttttggggaccggggctgaaaagcgggccttatgaagaaaaggtcattccggagcttgccccggatgatcaggacattgtcctcacaaagtggagatacagcgcgtttaaacggacgaatctccttgacatcatgcgtgaaagcggcagagaccagctcatgattacgggaatttatgcacacatcggctgtctcgtcacagcctgtgaagcatttatggatgatatccaaagcttctttatcggagacgccgttgctgatttttcttcagaaaaacataagatggccatcgaatatgcgtctcagcgctgcgcttacacggctttgacaaacgaagtgctggagctgctgggcggcgcgccggtttctgaaggagaagggaagacttccgccgtattgacaaaagaccgggtgcgggaacaaattgcggcgattcttcaagaatcaccgtctgatattccggatcatgaagacctgctggacagaggccttgattccgtcagaatcatgagccttgtcgaacaatggcgccgtgacggagctgaagtgacgtttgttgaactggcggagaacccgacgcttgaagagtggtggagacttctttcttcccgatctcaaaaagtcttgccgaacgcagattatttataaagggagagaatagaatgcatgatacacaacagctgcctctgacaggcgcacaggccggtatctggtttgcgcagcagcttgatcctgataatgcgatttacaatacaggcgagtatgttgagataaacggcgcgatcgatgtgaacatatttaaaacagctctcgaacgtgtgctgacggaagccgtgtcattacacgcccgcttcgaagagggagcagacgggccgaagcagatcatcaatcctccatttgaagctgcgatcgatgtcatagatgtgagttcagaagctgatccgaagcaggccgcactcagactcatgcagacagatttggctgagcccgttgatatggcggccgggcctttgttccgcgacattttatttcaggcgggaccggaacgctttttctggtatcagcgcattcaccacattgcgatagacggctacggtttttcactgctggcacggcgtacggcgcaaatatacaccgcaatacgggaaggacgtccggataacgggcgctccttcggctctttggaggaactggtaaaagaagatcaagaataccgcgcgtctgatcaattcctgaaagatcgggaattttggatggagaaatttgcggatgaacctgatgtcgtcagtttggcagaaagagcgccgagaacgtcaacaagctttcggagaagcacggcttatctttctgaaacggctttgcagcatgtaaaagcaattccgaactggcatgaagccgtcacagctgcagcggcggtatatgtccaccggatgacaaacgcaggggatatcgtgctcggtttaccgatgatgggacggatcggctcgatttcactgaatattccgagtatggtcatgaatcttctgcctttacggctttctctccgcccggatatgaattttcatgaggccgtcagccaagtggcaaaagaaatccgaaacatccggcgccatcagaaataccgccatgaagacatgcgccgcgatcttaaattgctcggagaaaaccgcaggctgttcggcccgcaagtcaatgtgatgccgtttgactacgctcttgatttcgcaggagcgccaggcaccgtccataacttatcagccgggcccgttgatgatttgtcaattaacgtttacgacagagcggacggaagcggaatgcgtgtggactttgatgcgaatccggaagtgtacagcgccgaagatattgaaaaccatcaaaaacgattcctgcttctgctggaatccgctgtgaaagaccagacacaaaaaatcggcacactcaaccttctgcctgaaagtgaacgtctctgcgtactggaaagctggaatgacacgcgcaaggccgagaagcagaaaagtctgccggagctgttttacgaacaggccgtaaaaacaccggaccggccggcaatcatcaccgaaaacgaagagctcagctatgccgaattgaacaagcgcgcgaaccagcttgccggcatgctaaaggaaaaggggctcggaccggaacaatttgccgctttgctgcttccgcggtcacaggagttggccgtgagcatgctggccgttttgaaaacgggagccgcatacctgccgcttgatcctgattttccttctgagcggatcacatacatgctcaaagatgcacaccctgcatgcctgattacaacgatggaattatccggccgcatgccggaagacagtgatgcaaaaaggatcattctcgatgacccggatacggtaaaaaccgttgccgctcaaaatgctgactgttccgatcaggcggaatgttcgcctttgcaccccgcttatgtcatatatacatcgggttcaacgggcaaaccgaaaggcgtagtcgtgacattaaaaagcgtaagcaatttcctcttatccatgcgggaaatgttcccgctcggcgcacaagaccgcctgcttgccgttacgactgcggcgtttgatatttccggacttgagctcttccttccgctcatcagcggggcggggtgcgtcatcgcacgtaaagagacgattcaggaaccgcgggcgcttgcgaacatgattcactcatacggtatttcaatcatgcaggcaacgccgacattgtggcattcattagtcaccaatgaacctgattccctccgggcgctgcaggtgcttgtcggaggtgaggcgcttccgaacgcgcttatgcatgctctgcttgaatcaggctgtacggtgacgaatctgtacgggccgactgaaacaacaatctggtcggccgcacagccgcttgcaaaagaccatacaggggcgcctccgatcggaaagccgatttggaacacgcgggtatacgtgctggacgccgcattgcagccagtcccgccgggaattgcgggcgagctttatatagcgggcgaggggcttgccagaggttattataaccgtcctgatttaacagctgaaagatttattgccgatccgtacgggcccgcgggcgcgaggatgtaccggacgggagatctcgtgcgctggcgtgaggacggctcgcttgattatatcagcagagccgatcaccaaattaaaatccgcgggttccggatagaattaggagaaattgagtcagtgctgtcgaaatacccgggtatttcgcaggccgctgttattgtccgtgaagaccagccgggagataagcgcctggcggcttatgctgtcgcggatcagccccttgatatcggcggacttcgtgaatatatgggcgaaagcctgccggattatatggtgccgggcgcgtttgtacagctgaaagaattgccgctgacgccgaataagaagctcgatcgcagcgctctgcctgcacctgatttttcagctgtcctgtctgacagagggccgcggacgccgcaggaagaaatattatgcgatctgtttgccgaggttctcggtctcgcgcgggtcggaattgatgacgggttctttgaattgggcggacattcgctcttagccggacgcctgatgagccggatccgggagacgatgggcgcagagcttggcatcggacgtctgtttgataccccgaccgttgccgggctcgccgcacagcttgacaccgcaaagagtgcgcggcctaagctcaagccgtttgaccggccggagcacatcccgctgtcatttgcgcagctgcgtctttggtttctctactgtcttgaagggccgagcccgacttacaacattccggtgattgtccgcatgtcaggcaagcttgaccaatcagcgctgaaacacgccttttacgatgttgtcagccgtcatgaaagcctgcgcaccgtttttccggaaaataagggatcatctcatcagcttattttacctgctgaagaagcccgccctgtgtttacagtgacacgtgcagacaaaaacgagctccaagacatgcttgccgctgcggcaagatatcggtttgatctcgctaaagagccggccgtccgggctgagctgtttgatcttggtgacggcgaatatacgctgatggttctcctgcatcacatcgcaggcgacggctggtccttgaatccgctcatgcgtgacttatccatagcctatatcgcccggcaaacaggtgaaaaagcagaatgggcgccgctggcggttcaatatgcggattatgcgctttggcagcagcagcttttaggcagcgcgtctgattctgagagcttaattgcgcgccagctggatttctggaagaaaacgcttgaaaatgtaccggatcagctggagctgccgtctgattttccgcgtcccgctgaatcaagctacaggggcggcgtcattccggtcaacatcggccaagagcttcatgcccgtcttctctcacttgccagaaatcagcgcgtaagcctgtttatggtgcttcaatcagggctttccgcactgctgacccggctcggggcgggaaccgatattccgatcggcagtccgatagccggccgcagtgatgacgcattaggagaccttgtgggtatgttcattaatacactcgtactgagaaccgatacctctggcgatccgagcttttgtgagcttcttgaaagggtcagggaaatgaatctcgcagcatatgaacatcaggacgtgccgtttgaacgtctcgtggaagaattgaatccggttcgctcccggtcaagacatccgctgttccaagtgatgctcgcattccaaaatacgcctgaccctgtactcagtcttcctgatatggaaacaagcctgcaaatcagcagtgtcggatcgtccaaatttgatttgacattggaattggctgaacagcgccatgatgacggcacgcctgccggtattgaaggcctgctggagttcagtacggacttattcagaaaagaaacggctgaagcacttgccggacgcctgcttcttctgctcgaagatgccgtatcacatccggataaaccgatcggaagcttaaccattctttctgatgaagagcgccggaagcttttgccggttaaacgggcaaaacagcatattcagcctcggcagacactgcctgaactgtttgaaatacaggccgccgcaaaatcggatgaaacggcggcagtatttgaagagagcggactcacttatcaagagctgaataaaagagccaatcagctcgcgcacatgatgattgcccgcggcgtcggcccggagcagtttgtcgcactggcgctgccgcgttctttagatatgattgtcgggctgttagccgtcctgaagacgggggcagcgtatttgccgcttgatcctgattatcccgcggaccgcatcgcttttatgttacatgatgccaagcctgtatttatgctcaccaaccgtgaaggcgcaagtaagctctctggcgaaaacggcatgccggccttcatcctggatgatccgcagaataaggaaacacttcggcaatatgccgtcacgaaccctgagaatgccgaccggattcgtccgctgagaccgcttcacccggcctatgtcatttacacgtcgggatcaacaggtgtgccgaaaggtgtcatcattccgcacagcaatgttatccggctgtttgagtcgacgcggcattggtatcactttaattctgatgatgtatggacgatgtttcactcctacgcttttgatttctctgtctgggaaatatgggggccgctgctccacggcggacgtctcgtcgtcgtgccgcatgacatcagcagatccccggaagcgtttctgcatcttctcgtgaaagagcgagtgaccgtacttaaccaaacgccgtcagcgttttaccagctgatgcatgcggaaaaagaacacaaagagctggggcatcagctcgcactcagatatatcatcttcggcggcgaggcgcttgagctgagccggcttgaggattggtacagccgccacgcggacaatcagccggtgctcgtgaatatgtacggcattacggaaacgacggtgcacgtcagttaccttgaattagacaaaaacattgccgaactgagagcaaacagcctcatcggctgcggcattcctgatctgaacgtatatgtgcttgatgaccggctggagcctgtgcctccggggatcacgggcgaaatgtatgttgccggagggggcgtggcacgaggctacttagggcggcaaagcctgaccgccgaacgctttgtggctgatccgtacggcccgccgggaacgagaatgtaccggacgggggatttagcccgcctgcggacggacggttctcttgattatatgggcagggcggaccaccagattaaaatccgcggcttccggattgaattgggggaaatcgaagcggttctcgtcaaacatccggatgtcgaggatgccgccgcagtcgtccgtgaagaccggccgggagataaacggctggccgcctaccttgtccgatctgccggcagcaccttggacacgggggacatgcgccggtttgccgaagaaagcctgccggattacatgattccatcagcttttgtccaaatgaatgaactgccgctgacaccgaatggaaagcttgaccgaaaagcgctccctgcgcctgacttccaaacggaggtcaccggccggggaccgagaacgccgcaggaagaaatgctgtgtgagctgttcgcagaggtgcttcatctgccgcgtgtcggtattgatgacagattttttgatttaggcggccattctttgcttgcggttcatttaatgagccgtattcgggaagcgatgggagccgagctcagtatcggaacactatttgaagctcctacggtggcaagccttgctgaaagacttgagtcaggaacgggcacaagcgcgcttgatgttcttcttccgctcagaacggcaggagaagaaacaccgttgttctgtgtccatccggccggcggtctcagctggtgttatgccgggctgatgtcttctttagaagctgattatccgatatacggcttacaggcgagaggcatcggaaaaaaagaaccgcttccgcaaagcttagatgacatggcggctgattatattgaaaaaatccgcaccgtgcagccgaaagggccgtaccgtctgctcggctggtctctcggagggaatgtcattcaggccatggcgacacaattacagagccggggcgaagaggtttcgcttttggtgatgcttgacgcgtatccgaatcattttctgccgataaaaaatgcgcctgatgacgaggaagccgtcattgcgctgcttgccctgggagggtacgacccggacagcctcggggatcagccgcttgattttgacaccgcgctgaccattctccgccgtgagggaagcgcattagccagcctggacgagtcagtgatgatgaatctgaaagacacgtacgtaaattctgtcgggctgttaggaacatacaagccaaagccgttccacggagatgtgctgttcttcagatccacgattattccggagtggtttgacccgatcgagccggatacttggaaaccgtatattactgggaaaatcgagcggtatgacttagactgccgccataaagatatgtgccagccgggcccgcttgccgacatcggcgcgattctggcagagaaattaaacggacggcgtacagtccggtaaagaaaggaaagagatgatatgacaaatccatttgaacgggaagacggttcataccatgtgctcgtcaatgctgaaggccagtactcactgtggccggcctatctggatgtgccggacggctgggaaacccgcctgacgaatgaaacccgccccgtttgtctcgaatatattgaaacaaactggcgtgatatgaggccggaaagcctgaagcggaccgaagctgctaaaatgtaataagaaaagcctgccgttatttcggcaggctttttatgcggacatcagccgttaagctgtgtatgatcacaaaatgtataagggtggccttcttcatccgtgcaccatgactgagacagaaaagccaaaaagaccgcggcccactggtctgcaaactggattaaaataccgccgtcgtgccacgttccgttatccttcttccagcgtgtatcaattgggtttccctgattcatatgaatattatgcatgccgtttgtcggcttgaacccgaaaatcttatcagcgcccggctccggcccgaatttagagccgtaaatatagacggtggctttttctgatttggctttttgcatgtacgtctcaataaagtcatttaagtcattatccggaccggtgacttcatgcggaaggggcaccatgttccggggatcaaacaatccgccgcggacataatccagcgccagctcacgtctggtttcatcaattggggtatatccgtacggaatgttcggcagcagggtgatcgcgcttgcgtcaaaatgatcgcgtgccgcatacagcacctctgattcttttgaacttgacatgacattgatcgcacagcgatagcgcgtatcaggctcgcctagcacctcgacttgaaaatgcggagaatcatcatctgtttcccttttcatatctaacacagtgccttttaatacaccatagtgctgaacagccatatgaatcctcctttttcttccgggatatgaattgatattcgagacagggggccgtttttccttttgtgagaaagaaaaaaggacagcccgctgatcaggctgtcctcttcatctctattaagcttttgcagccgaaccttgcattgctttttcagcaggcacgtagtcatagcctaagtctttggctaccgcttcatacgtgacatgtccgttagccgtatttaagcccgctttaagcgcagggctgtctgcaatggcttgtgccgcgcctttattggcgatttgaagcgcgtaaggaacggttacattcgttaatgcgagcgtagacgtacgcggtacggcgcccggcatattggcgacagcgtagtgaacgacgccgtgtttttcgtaagtcggattatcgtgggttgtaatatgatcaacggtttccacaatgccgccctgatcgatggcaacatcaacaatgacggaacccggtttcatttgtttaaccatttcttccgtaacgagagtcggcgctttggctcccgggatgagcacggcgcagatcagaagatccgcttccgcgacggaatctgcaatatttacagggtttgacatcaatgttttaatctgatgcccgaaaatatcatcaagctgacgcaggcggtctgcgttcaaatcgatcattgtcacatcggcaccgagtccgacagccattttcgcggcatttgttccgacgccgccccctccgatgatcgtgacttttccgcgggatacacccggtacgccggctaataaaattccttttccgccctttggtttttcaagaaactgtgccccgatctgcgcggccattctgccggccacttcggacatcggcgtaagcagcggaagggaacgtccgtccgttaccgtttcgtacgcgatagctgtcacacctttttctgtaagcgctttagctaattccggctctgcggctaaatgaaggtaagtgaacaagaccagaccttgacggaaatacgcatactcttcagccagcggttcttttaccttcatgaccatttccgcatcccatacttgctttctgtcctccagaatttccgcccctgctgatacataatcttcatttgtaaagccgcttccgagtcccgctccggattccacaagaacccgatggccgtttccgataagctgtgaaacgcctccaggtgttaatgccactcgattttcattgtttttgatttcttttggaaccccgataatcatgtctgtttcccccaatgtttgtgtgatgcttcaagtgtagcgcgatttttgcgaaaattctttgtttgaaacagaaaataaaaaaacacggatttgtgaaatttcacgaacccatgctgcgaagtttgatatccaggtaaatcgtaaacttctcattcacattttttaagtcgatttctgcgatctggctgattcttttcagcctgtaattcaatgtattgacatggatgttaagcgctttagcggcggtgttgacattgctgtcggcatcaataaaatgttcgagcgtttttaccatatcggcttggtgctccctgtcatactgctcaagctttgacagggaatagttcatatagccgctgtgcttgcgtttttcatccaacacatcaaggtactgataaatgccgagttcagaaaagctgaaaaggtgtttggtttctctcacaaaccgctctttcgcttttaatacggaaagcgcttcctgataggatcggtaaacgtaagaaatcgattcgtaaataccgccgatcgcaatcgacgcatcctcaattttatatcgttccttcaactgtttttgaatatgaagagcgaagtgctttaaatctttaaaaggctgatcggttttcggcgcggctaataagattaattcatttgaatcaacagtcgccagcatgacatgaatctgctgtgtcgtttcctgcaaatattgcagctgctgttccgtcttttcagtcagctcatcatgtaaacggatgatcatgacgctgaacacggacggcagcgccattccgagcttatgaaacccttcggccatctcggcttcctgataaatatggccggtcagcattttccaaaaaaactcctggccccgctcttcgattttcgttttgcggatctgcaggtgcaaaagcttgttccgcaccgctttggctgccagctgaagtgtcttcagatcttcgtcattgagcttttttttgatctcaagcgcccaaataaatccgagaacctgactgtttttccagatggaaatcgccacgcggttgcttaggcccacctcgtcaatttctttcactttgatcggctggtccgtttttaaaagggccggaatggttccgtctttccacagtttgttgatgactttttccggcaccctccgcccgataatcgtcgacgtccgggcaggatctgtacaatcgctgtgcgtgctgtatgcaagcagtttatgattaacgtcttctattgtaatggggcattgaagaacttcactgatatggtcggcaacatcttcaagcctgtcgaaactgtacttaaatggatcttttggattggtcatctgtatccctactttttcatagcttcatatcttgatcttaccatcttgcttttcagactgaaaggcatctttgcagggaaatagactaggacaataagatcattcagtgaaaacgaaaataataagaaaatcatactattttatttacaaaatgtgtaattatgacgaaaaatccaatatatcataagactcattttgtaaaattaaaacagatttgtttgactgtgccgattggttgtttttataataatgacgttcaaaaaataagtgaattagcccatatttaggctgatgacacaggagggtataaggaatatgtctggattaattcgtgtcacacccgaagagctaagagcgatggctaagcaatatggcgttgaaagtcaggaagtcatgaatcaggttgaccgcctgaaccgcatgatttctgatttgaaaggcatgtgggaaggtgcttcaagtgaagcattcgcggatcaatatgagcagctgaaaccttcatttattaaaatgtctgaattgcttcaagatgtgaatcatcagctcgatcaaacggcaaatacgcttgagtctaccgaccaagatatcgctaaccaaattcgcggataataagatgaatgaagaaacggagcgcctgattcaatcaagaagacggcgctctttctatgtaagggtgatatgaatatgtatatcgatattacaatagatttaacacattataacggcagcgtcttcgatctcagattgtcagattaccattctgtgaaaaaagtcattgatattgcccggcaggctcagcatgtatccgttccgccgcgtgaaggctattggatcagagtggtcaataaagaaacggttttttccggagaacaaaagctatctgactgcggcattacgaacggagaccgccttgaaattttatgaaaggacatggtggaatgacaggtcataacagatcttatttagaaacagaattagacgccgtccgggaagaaaccgaatcaggcttcacgttcaccttccagcgggaaaaaatcaagcttcttgacgggctggaagcgaatgtgattaaagatgccgatcctttttttcaaaaagaggtctcagtttcagaagacgaagtaaccatcacaatcaaacctccttcttcttatcaggctttccgctatataaaaggaaaagataaaaaaagcaggtggcaatttgcctaccgtctcgtccaagccgtgaaacagcataagctgaaacgtctcaatctgattgccgcccctgaaaatatcgtgtttgataaagcgctgacgccttactttcttcattacggcgtaaaggagagccttccgccttatgaggaagatagagaaagggtgttaaaagagctcaaagcctgtgcggcgcttgcagctgacggggcgtacaccttcgatgaatatttgaagtacaaggagacgcttcatttctctcctgaggtgaaaagcgtgttagaggcggagacgattgaagaactggaagaagccattcaaaccgcaatcgattccctcgaagaaagggacaagacatacataaaactgccgaaaaagaaatggaaaatccaaagatacgccggtctggcgcttgccgtcctccttgtgccggcacttctttactccttatacgttctgtttttcgtccagccgaagcaagaggcaattacggaaagcaaccgctattttttaaatcagcagtacagcaaagtcattgacacactcgctaaatacgatgcggaaagcctcccggaatctgtgcagtacgagcttgcttcctcttatgtggcagttgaaaatctgagggaagaacagcggaaaaacatcgggaatctggtcacgctgcaatcagacccgaagcacttcctttattggattgatatcggcagaggggaaaatgaagaagccatcaaaatcggccgcaatcttgagtacaacccgtacatctggctcggacttacaaaatataaacagcaattattagcggatgacagtatgaaagacgacgaaaagcagaaagaactggacgccgtggaaagcgagcttgcgaaggcgaaaaaagaggcggaggaacagcataaagaagcggaggaaaacagtgacaccgccgaagcttccgccggacaagatgaaagcaaacaagacaaagcgaaagataacaaagagaacgacaagaaagatgagaaaaaagatgaaaaaaaataacagcacacatcaaatggccgcatgtaacgatcaggctgtcgtcaggaggttcgccatatgagtctgttatgggtcttttaccgagagcacgtacaaaaggttcagctgtctgaactcccgccctctcagccgattacgatcggtccggatatgaaagatacaatcacggtcggcacacttccgttacggcaaaacgccgcaaccctttatcggaaagaaacagatcgttatgatgttttcctgggaaataactgtgccggcgaattgacaataggaaatgaaatgccctgccggattgaagaagagacgatgcggcttctgctcacccctgaccaggaagaatcctccgtgtactttatcggcgggaaggatgagatcgttttctcatcagaaacagaggaagcggatatatacaaagagccgtcctccgctcaaacaggggctttttatctgcgtaagtcgggaggatgctggtctgtcgtccctgatggtcaggaagtttatgtgaacggaaagcttgcagaagctcccgaaaggctccggacgggagatgagctgctgtggaattttctgcgtgtgaggctgacggaggacgaccttttagaaatcgttcatcacgaaaagcttcaagccggtttaaccaaaacggtaaaaccaagcaccgaaatgaaaaagaaatacccgcaatatcgaagaacgccgcgcatggtctacgatcttcccgaagaccgcgtttcattcagctttccctcgcaggaaagcgaacagaataaccgggggctgtggctcgtcattctgcctcctgtggtcatgctgattgtaatgggggttgtcgctattatacagccgaggggcatattcatccttgtctctttggcgatgtttatgatgactctcattacgtccaccgtgcagtatttccgtgaaaaaaccagcggaaaaaacgggaggaaaaacgggagcgtgtgtacaagcagtatttagaaagcaaacggaaagagcttcagacgctgtcggaaaaacagctgcacgtgctgacgcatcattttcccccgtttgaaaaaatgaaatatttaacttctgaaatcagcggccgcatttgggagaaatcgctggaaagcagggattttctgatgcttcggctcggaacgggcacggtcccgtcaagctacgagatttcaatgagcggcggagacctggcgaaccgtgatgtggatgacttgatggagcagtcgcagcacatgcagcgtgtgtataaagacatccgccatgcgcccgtgaccgttgatttacaagaagggccgatggggcttgtcgggaaacctcagatcgtcaaaaatgaaattcaccagctgatcggccagctcgcgttcttcaacagctaccatgacctgcgatttgtctttatctttcatgaggacgaatataaggaatgggaatggatgaagtggctgccgcaatttcagctgcctcatatgtatgcgaaaggatttatttacaatgaacagacccgcgatcaattgttatcgtccatttacgagctgctgcgggagcgggatttggaagaggataaagaaaaaaagatctttcagccgcattttgtctttgtcatcacaaatcagcagctgatcgcagagcacgtcattttagaatacatcgaaggccggcatgagcatctcggcatctcggccatcattgccgcggaaacaaaggaaagcctggcagaaaacattcacaccctcgtccgctacattaatgaagatgagggagacattctcattcaacagaaaaaagcggtgcagatcccgtttaagctggacaggcatgaacggacaaacaacgagcggttttcccggacgcttcggacattgcaccatcaggtcggaatgacgaattccattcctgaaacggtctcatttctcgagctgtttcatgcgaaggaagtaaaagaaatcggcatcaggcagaagtgggagacaagtgagtctgcaaaatcgctggctgttccgatcggctataaaggaaaagacgacatcgtctatttaaacctgcatgaaaaagcgcacgggccgcacggattgctggcgggaacgaccggctccgggaaaagtgaatttctgcaaacatatatcctgtcattggccgttcactttcacccgcatgaagcggcgtttttgctgattgactataagggcggaggaatggcgcagccgttccgcaaaatgccgcaccttctcgggaccatcacgaatattgaaggaagcagaaacttcagtatcagggcgcttgcatccattaagagcgagctgaaaaaacggcagcggctgtttgatcaatatcgcgtcaatcacatcaatgactatacaaaactgtataaacagggagaaacggatattccgatgccgcacctgtttttgatttcagatgaattcgccgagctgaaaagcgaagagcctgactttatcagggagcttgtcagcgcggcccgcatcggacggagccttggtgtgcatttaattctcgccacgcaaaagccgggcggcatcattgacgaccaaatatggagcaactcacgctttaaggtcgcgctgaaagtgcaggatgcaagtgacagtaaagaaatcctgaaaaacagtgatgcggcgaatattacggtcaccggacgcggctacttgcaagtcggaaataacgaagtgtatgagcagtttcagtctgcctggagcggcgccccttacatggaagatgtatacggcaccgaggatgacattgccatcgttaccgataccggcttaattccgctgtctgaggtggatgcggatgatgcggcgaaaaaagacgccccggcagaaatagaagccgtagtcgaagaaatcgagcggattcaaaatgaaatgggcattgaaaagctgccgagcccgtggcttccgccgcttgccgaacgtatcccgcgcacgctttaccccgcgcaggaaaaagaccgcttcttcatcgcctgcgttgatgagcctgatcagcaaagacaggcgcctctcgcttacacaatgatggatgacggcaacatcggcattttcggctcatccggctacggcaagtcagtggctgccatcaccttcctgatgaatttcgcggaaggatacacgccggaagagcttcatatgtacatctttgacttcggaaacggcacgcttctgccattggcaaagcttccgcacaccgcagactatttcttaatggatcaaatgagaaagatcgaaaaattcatgatccgcatcaaggaagaaatcgagcggcggaaacggctgttcagggaaaaagaagtcagccatatcaaaatgtacaattcgctcagtgaagaagagctgccgtttatatttatcacaattgacaatttcgacatcgtcaaagacgaaatgcatgaattagaaacggaatttatccagatttcacgcgacgggcaaagcttaggcatttacttcctgctgaccgcaacgagggtaaacgccgtccgccagtcgctgttaaacaacataaaaacgaaagtcgtccattatttaatggatcagtcagaaggatactccatttacgggcgtccgccgttcagtctcgaaccgatcccgggccgcgtcatgatccaaaaagaagaactgtatttcgcgcaaatgtttcttccggctgaagcggaaaatgacctcgagatgttccaggcgctgaaagctgatgtcaaagctttagctgagcgccacgccggaacagccggaccagacccgattccgatgcttccggatatgctgacggccggcgaattttcactccgtctcggcccggaacaagacccgttccgcattcctgtcgggcttcatgaggaaaaggtcagccctgtgtactttgatctgggtaaaaataagcattgtcttattttgggccagacacagcgtggaaaaacaaatatcctgaaagtgatgctgaatcacctgctgcgtgaaggtgcggaacgggtcgggctgtttgactcgattgaccgcggactgtcgcagtatgcgcaggaaacaaaggtcagctatctggacacaaaagaagacgtccggcagtggatcgaaacggcagaagccattttcacggagcgcgaagctcagtatacgcaggccgtcaaaaatggcgatgtgcacaaactcagtttctctccggtcgtgttaatggccgacggcattacaagattccagcagacgatcgacaccgccttacaggacaagctggcgatgtttatgaaatcttacgcgcatgtgggcttcagttttatcccggcgggcaatcacagcgaattctcaaaaggctatgattccttaacgacggaaatgaaacagatccgccacgcgatgctgcttgtgaaaaaatccgaacaaaatgtcattccgctgccttaccaaaggcaggaaccggacattcagccgggcttcggctatttggttgaaaacgggaaggagcaaaaaatccaaatacctttatgttcagcggaaagggaggccgtcagatgaccgaacaacgaaaaagcctgatcaaattaatagccgcggtcgtcatcattctgctgctgccggtgctgtttttccggtttatcggcgatgacccgggaaaacaaaaaatcaacgccacccgccaaatcgcagtcgtgaatgaagatatgggcttacaaacagatgaaaatgaggaagaggaatccgtccatttcggcaaagaagtagcggccgctctcggcggccgtccggattattcatggacggttgtcaacaggagcgcggcagaaaacggtctggcggctaagaaatatgacgccgtcgtttacattccatccgatttttcaaaagacatcttaagctatgacaaggagcgtccgcaaaaagccacgctgacattcaatattcaaagcaacctgaacgccgtcaacaaagaaaaagtgcagcgtgagcttgaagacgcccaaaaatcaatgaataaaaaaatgtcggcattatattggaatttcgtctcacaaaaagtgaacaatgtccgaggcgattttgacaagatcgtcaataaagaatcagagtttcaaaatgtcatgtacaacttttacaagccgagctccaatgacttggcaggtgaaatcaaacggcaaaaagacctgattgacgaactgaaaaaatcaatgaatgaagcgcagggcgcggcaaaagaaaaactgacttcggcagatgaagccaaaaccacgctcaaagactttgccgacacggtcgagcgctacaaacaatatcaagaaaatcagaaaaaactgctgatggccgcgcaggaacaaaatcaaaagcaaatcacaaccggactgaacgccattaaagcacagcaggccgccaaccagttcagcacgatgatgagcgggctctcttcaggcataaaccgggcgcagacacagcttgaccagacgggatcggctctttttgccgcccaacaggtgagagaagcgcaggttcctgatcaggaacgcgggatggcgaatattcaatccaatttactggacaattatttgactcaatataaagcgcaagcaagatttgaaacattgaacagcattcaaacccttatgaaaagggatcggccggcattaaccgttccggaaaaggacccgggtgatgacggctcggatgaaccgaaagaagaagaaaaaccggaagaagaaaaacccggcgatctgaaaattgaccttgacgatcagcgtgacgaattaaaacgcatctccgctgaaatcaatcacatttctgacggattaaaagaaccggaaaaagaaaaaccggaaccggaagaaccgggccaaggcgatgacggtgaaaactccggcgataccgatccgaataacggaacggctcccggagaagacggaaaaacggaagacggcacaaaagaagagcagcctgcctccgataacacaggcgatcaggagccaaaaaccgtccagacctcgacagccgctgaaaacgtcactccgcctgctgatgagccggcggacgatccaaacgattctgaaagggacggcggcacggacatatctgaggcaaaagaaaggctgaaccaagccgcagaacgcattcagcaaattgaaaaagagctggaagagaaacagcagactcataataaagaactgaaaaaacgtctcgatgctcttgatgaagaaatccaaggccttaaaaatcagattgccaaagttgaaaaacgggcagataaattaaaggaaaatttggaagaattggaagaaacgagaaaacaagacttcgataccgtttacagaatgattgtaagaacagaacagaacattctgaactacccgtcattggatagcggccgcaaatctgctcttgaacagatgtttgccgctgacatcaatacaaaaaagatatccgatttaatgagttactataatgatttatccctgtatgaggcgacactctatcactctcttgacgcgggctcgctgcctgatgtgaaaaaccgggtgctgaaagcccagcaaggtgaagtccaaaccgttcttgccatcaaaccggaagaaacggcaagctgggaaaatctgaaaaacaacaaaatgcagactgatgaagacatcagcaatttcattaaaggcatgaccgaattctcggataactacagctcgtatatcagagatgagcaagccggggtgctcgatgagcttgccagcatttcagacagcgcggcgaaagcatccgatcagctggctgaaggcgctgtgcaggaagcggccgcgttcagcggagacggattaaccggaacgatggcgctcggcgctcaggataccgtcggccgtgaagtcctgcaaatgtctgacacgatgggccatctgtcagaacgccagtccggcatcatcagctataccgacaatatgcagcaaagcgtaaatgacgtccagcaaaaagcggacaccctgaacagcaactggggcaaaaacgtcgattccacgaaattgatcagaaatgacgtgtacggcattttagggaacgcgctcgttgacggacaggaaaacggatatgtttatgattatctcgccaatccgcttaaaatcagcggagaggtgccggaagaccgggttcagaatgttccgccggtcgtcattttggtgatcgtcctgatcagcagtcttctgatcggctatttcagctcgtattatcagcaggcgccgcttcttgtcaaaggcgcgctctttgggattttaaacattatggtcggattgatgatcagtctgttcggtctgaatatctattcgcttccggatgatcagacgattaaatggtcagtctttacgattctcctgcttgcggcgagttcagcttttatccgggcagcctttgtcttcagctcaattaccggatggatcgcatcatcagcgctcattctcttttatgtggcgcctttgatcgacctgattatgccgaacttcacctttgacagtccggtttcgaaagtctatatcgatattcaatacggaacgggccatctgtttgcgttgggggtaacggttcttgcgatcattacgctgattgcggcggcgcttccgctcgtcattcggctgtttgcggaaaaaacggaggaaagtgatcagtcttatgaggcgtaacacgttcatggaaaaaggattgctgctgtttgctctctcctttttccttttccttccccaagccgcagccgcgaatgaggaaaatactgatgtcaagccgaatgaatatgaaaagaaagacattgaaattcgtacggactacctgcacgacgatgcctactccgaggaaaaaacggcgcttccgaaagaacagaaggatatcacgtttgatcagccggccgaaaacccggatgacaaactgatatcaaatttgtttacatcgtcagacacggagccgaatacgatcaaagcgcaatcgaaacaactgggtatcacatttgccgagccggcggtgcggcatacctcggcagatatggaaacggaagagaaaaagacttcttatctgcttcccgctatttatgccgtcttgatcctcctcgggattgcggcaatgatctatctgatcccgaaagtcacggcgcaggaaaaggcaaagcggtaaaacggatcgcttgtgtttgcgggaagacagcccgtaaaataagaaaaaaaggaggagtttcatgcagttttttcttataacaggcgcgtcaaaaggcttgggccgggcgcttacggaacaggcgcttcaagaaggagccgaagtcgccgcgctttcaagaacgataagcggggaaaagcgcgaggggctgacagaatacagtgttgatttaaccgatctcgcagataccgggcggcagatgaaggcgattcttgatcaagcagaggagaaggggtactccgccgtcacactgatcaacaatgccggaatggtggaaccgatcaagcgggcgaaagaggcttccgccgaagaattgaaccgccattacacccttaacctgacggcgcccgttttgctcagccaaatgttcacaaagcgcttcgaagcgttcagcggcagcaaaacaattgtcaacatcacatcgggcgcggcgaaaaatccttataaaggctggagcgcgtattgcagctcaaaagcggggcttgatatgtttacgagaacattcgggtttgaacaggaagatgaagagctgccggtccgcatgatatcattctcgccgggagtgatggatacagacatgcagtcggtcatccgttcttcgtcaaaagaagatttccatgacatcgaacggttccgcaatctgaaagaaacgaaaaacctcagaagtcctgaatacatcgccggcgtcattcactcactgatcgcgggcgagccggaaaacggacggatatacgatatcaaagaatttttgtagagcagctttcacgctgctctttttttgtttgtacaatcacttaggggtccggcggcatatgatgaatgaaacaacatataaggggtataagaaatgtatcagatgaattgagtttcttctcgatttatgttaggattctaaaaatatatgaaggaggggtttccatgagaaatgtaacgttaatggatgtcttcacccatccaatcgcacaaaagtatttacagcgttccggtgtcgcccatgcgatcgcctgcgcgtttcatgcataccgtcttgccgtaaaagcaggtgtcagcccggatctggcggcgaaagcggcattactgcatgacgtcggccattatgaatggtacacagacggcaaatgggattatgaaaagtacagaagaaatgatatccatgccattaaaggcgcggaacgggcgcataagctgctcatccggctcggtgaagaaccgaaagcggcgaaggacattgcgctggcgattctgcttcacaccgattcctatctgcctgaaggcgaactggacaagaatacgctccagcaaatcgtgaaacaagcggatgaactcgatgaagaacccggcggacatcaccattaccgccaaatggatcacacggccgcgctcaaacaaatccaaaagcttgatcagttaattgaccgagcccaatatcccataagaagctcagtctaggccactcatgcggccttttccgcttacataactccgcatgctcactaacaccttttccgctccgatagacgtactgtgtcaaagcctttgtccgctgcatatgctgaaggaaaacatagtaaaggggatcagcgaaaatggcccatcaaggaagcccgcaaatcgtctcgttagtggatccttacgtttatcagaccatccataagcttatcggctcaaggtttatcattcaaaccgtcagacgcattgtcagaggacggctgattgatgccactccggatcacatcgccattgaagagacgcatgaccgtgtattttatatcagaaaccgccatgtggtttccgtcatgcctgattataccgaacgcgtgtaacagcccgaaaaggcgcaaaccggaggcggcactatagaaccccggtgcgtcttcttttttgagatacatagatgcacggcggctttttttggtacaatcacagtacaagttcacacgacaataggaggaaaccgcttgttgaaatcaaaggtccatttttggacgctgcaaattttgctcgttttgctcattatttacgtatcaacgaaagtctcgtttatatttcagccgtttttcggttttatcaccactctgttttttccgattttgatctcgggcattttgtttttcatttttaatccgatcgtgcgcctgcttgagaaaaaaatcccccggacattggcgatcctgctcatttatctcgttttcatcggtctgattgcctttatgttcactgccatcgggccgattgtggcttcccaggtcacggggctgattaacaatttccctgattacattcatcagattcaagtcttgacggcgcaattatcccattccaaatggtttacgtggatgatgacgcaggattatgtgtcgatagaaaaaatccagcagtctctgacgggatttttacaaagccttccgcaaaatattacggcaagcctgtcggccgtgttcggcgtcgttacgaatatcacgcttgtcgtgatcaccgttccgttcattttgttttatatgctgaaggacggccggcggtttccgctcttggcggtcaaaattctgccttcttcctaccgggcggaaggtcggaaaatatttaacgacttatatgtcacattggccgcctatttccaaggccagctgctgatttgtctctttgtcggaacggcatgttttatcggatattggatcatcggcctgccgtatgcgttaattctcgggatggtgatcgccgtcaccaatatcattccgtacctggggccgtttctcggggcggcgcccgcggtgattattgcgtttatggattcgccggctaaggcgctgtttgccgttattgttgtcgttgtcgtccagcagcttgacgggaacctgctttctccgcttgtgattggaaaacggctgaatacccacccgctcaccattattcttctgcttatcggagcgggcagtttcggcggcattctcgcaatgatcctggccgtgccggtttacgcggttttaaaagctttcgtcttaaatatcgtccggcttatcaaacttcgtcagcggtcaaagctcgaagacagccgcaagccgaaataaaaacgggcacaactcccggtgcagcgcataaaatgctgtaaagaaaagcggaggtgtgggtatgcctgcaattgtgggaccgatttatattatgagtttagccggagacgctgcagcgagcttcggtgacgtgtttgccatttctcccaaagccgttgaccactcaggcgcgggggcaggggcgtttcattccggagattttgtcaaaattactaataaattcagcaaaacgcgctttgaagacattgatgtgtttgacgaacctgattggtttaacgcgtgacagcctccttttaggaggctgtcgcttttttgtagtataatagaatcagtctttataaaaggggaatgttttatgaaaatcagaaaagcgaatattaccgtgcagtccggaatgatcggtgatgtatatctgcatgaaaataaaaaagaacagcatacccttgtagccgttccggaacttgagtggagcacgatcatttcctatgaggaagagaaaaaggcgctggcgcagcggcttttacaatcattcagcaagctgattgaagaagaacccgccggagagctcgccggcaagatctcccattgggtggctgaaatgtaacgaaaacggtttaccgcgtcccgtccggggcgataattgtaaaacaagctgggagggacaggccgatgagcgacaaaacggttgacctttatttacagcaggggatgtacggccctttgcagacgaaaccggatgaacgccatttatttttaggctcgctgcgtgaaagagtcatcattgccctgacgaagggacaggtgctgcaaaagcagccgtatgaagaagtgaaacaggcgctgaaaagccgaaaagacgcggtgctctatataaacggaaggctcccgtatcatgcttattcaccatatatgaagcttgccgcacttgccggtgtccgaagctccgtcatctcggaccttcaattcgaaacgccgctcggcctggtttttgccgccgattatgccgtgaaccttgacggcatttacgtgcaggatgacatttttcagcgctcactcctgaaatcttaaaagggcaaaacactgtttgtcattttacaatgccaattcacttacaagtggagataggatataatggttttcatatgaatggcggggaggccggctatgaaaaaagcatttatatgcattgattatacgaatgattttgcagctgagaacggggcattaacctgcggagaacccgcgagacagattgaagatacgattgtcagtttgacgcaagcatttatagaaaacggtgattacgttgtctttgcggtagattcgcatgatgcagacgatgactttcatcccgagacacgcctgtttcctccgcataatatcaacggcacggagggcaaagagctgtacggaaggctatcgcctctttatgagaaacataaacacgcaaaaaacgtaaattatatggaaaaaacgagatattctgcttttgcgggaacggatttagagctgaaactgcgggaacggcagatcactgagctgcatcttgcgggcctgtgcaccgacatctgcgttcttcacacggcggttgacgcctacaacaagggctttcagatcgtcattcatcaaaacgctgtggccagctttaatccggaagggcatgaatgggccctgtcccattttaagaacagcatcggagcgcaagtggcagagtaaggaaggggaaaacaattttggtggagcatggttttaaagacgacagtttgtctttacatacagacctttatcaaattaatatggccgaaacgtactggagagacggcattcatgagaaaaaagcgatttttgagctttttttcagaaagcttccctttgaaaacggctatgcggtatttgcgggcttagaaaaagcaatcgaatacttggagaacttcaaatttaccgacagcgatctgaattatttaaaaacggaattgcactatgctgatgatttcattgattatttacgggatctttcttttaccggatctctttacagcatgaaagaaggcgagctcgtttttaacaatgaaccgattatgcgggtcgaagcacccctgattgaagcgcagctgattgagacggctctgcttaacattgtgaattaccaaacattaatcgccacgaaagcggcccgcattaaaggcgttgtcggtgatgaagacgccctcgaattcggaacgcggcgcgcccatgaaatggatgcggccatgtggggagcgagagcggctttgatcggcggcttcagcgcgacgagtaatgtaagagccggaaagcgttttaatataccggtatccggcacgcacgctcatgcgctcgtacaagcgtaccgcgatgaatatacggcatttaagaaatatgcggagacccacaaagactgcgtatttctcgtagatacgtacgatacgatccgttcaggcatgccgaatgcgattaaagtcgcaaaggaattcggcgaccggatcaacttcatcggcatccgcctggacagcggggacttggcgtacctgtcaaaaaaagcgcgtgaaatgcttgatgaagcgggtttcacagacgcaaaggtcattgcttcaagcgatcttgatgagcacacgatattaaacctgaaatcccaaggagcgaaaatcgatacgtggggcatcggcacgaagctgattaccgcatacgatcagccggctctcggcgcggtttataagcttgtcgccattgaagaggacggcaaactgaccgacaccattaaaatttcgtcaaaccctgaaaaagtgacaacgccgggaagaaagagagtataccggattatcaacaagctgaatcaccactcggaaggtgattatatcgcgctttatgacgagcgggtaaatgatcagaaacgcttaaaaatgttccatcccgtccacacgttcgtcagcaaattcgtcactgacttctatgcgaaagacttgcatgagccgatctttgaaaacggcgttttatgctatgataatcccgaaattaccgacatccagcaatacgtgcaggataacctcaaacttctgtgggaggaatacaaacggatcagcaagccggaagaatatccggtcgatttaagcgaagactgctggagcaacaagatgcagcggattcatgaaatcaaaagcaagctgaaacgggaacttgaatagaaaacaaagcggcctttcctatctctggaaaggcttttttgttgtgataatatttttcacatttagacaaatttcgtcaagttatttgatatacttatgttcgaaggccgcatctaagggggtaaatgaatgaaggtgtttgttgcgagacagcctatcttcaacagaaacgaacaggttgttgcttatgaacttctttaccgggagagcgaagagaaccgttattcggccgcggatggagataaagctacgacggatctcattattaacagctttatcaacatcggaatcgaaaagctgactgaggggaaacgctgctttgtgaattttacagaaagcctgatgttttcagatctccctacctcctttgatcctgaccagcttattatcgaaattcttgaggacataccgatcactccggcgctcatctcaagatgcagacagctgaagaaattaggatatacattagcacttgatgatttttacgccatcaatccggaaaatgaagagttagtggaacagctgatgaaatatattgatattttaaaaatcgactttttgcaatcctcgcgtctggagcgcaaaaaaatcattcagacgtacagctgtaaaagtctgatttatttagcggagaaagtggagacgagaaaagattataaacaggcggccatagacggctttcacctgtttcaaggatattttttcagtgaaccgcgtgtcatcagcggaaatgatctgacgtttcattttcattcttactaccagcttttaagcgaattaaacaatgaccagcctaatatacagcgcgtgacggaatacatagagcgtgacgtcagcttatcgtatcagattctgcgttttttaaacggatcgcaaacaagactgaaaaaaaagatagacagcatccagcaggccatcatgatgctcgggctgaatgagattaagcgcttgatttacattctttcattcagagatttaacggcgaaaagccactcaagccaaaaagaaatcattaagatttccttaatcagggccaaactgtgcgaactgctggcgaaaagaaccggaaggccccagccctcttcttacatgctgatcggcatgttttcgctcatcgatacgcttctccacagggaactggaggatatcatcaaagaactgcctttaatcgatgaagtcggacaggcgctgctcggttatgaaaacgattattataagatgctcgcgctcgtcaaagccattgaatgcaacaactgggactgtgacgagtggggaaaagaactgaacaaagaagaagcgtatgaatgttacttacaggcgatcgaatggtgccggcagctgatcgattgagccgctttaagccgaccatctgagggcgatgataaaccggctttgctctctgatcagactgacacggatgccgtcgggattatacgtcacgtcaaagtcatttttgatgccggtctgcttaatgagccgcttgaccgctgcggtgtcagatgattgcgctgcggtgaggatgctgcgcgcaagctcttttgacgccgacagccgcgcaaggagcaggcgcgcatcctccagcatgcccgcagcttcttttgcggacgctgtcaaaatatctgcgtgaaccggggcactgggcgctggatgccggtatggcgcggcgaaaacagggcagcatggatacacataatgcatacggcggcctccttcctgagaaaacattcgttatacatgagtataggcggcgtgataatgagttatgacatgcaaaaagaccacaatgcgggggttgcggtcttttcggtgtttgtcggtggttatgcgacgctgtttgcccattctgttttgaaattgtgacggcagggactatagtccctgccggtttgtcggaaaaccgttgaaaaaacagcagaaccgccagattggtctgctttatcctaaacgtctgcctttgcggtagttatatagtcctgttcgctaaatgccctgttcgggactatggaattaccttggtttgcggtgtcacgcagatacttttacacatacttttcggtgaaaaatcccgcaaaaacgtttacactattagtaacagatcaaatacctaggactcgttcaccatacacaattcattgatctttcaaaaaaaggagtgtggaaacggtggaaaacaaattagaagaagtaaagcaattattattccgacttgaaaatgatatcagagaaacaaccgactcattacgaaacattaacaaaagcattgatcagctcgataaattctcatatgcaatgaaaatttcttaaaaagacttggaaacaagtcttttttttgtgcattttttatccatttcatggataaagtattatacgattgttaaaaaacgaaaaacctgctgtctttcatcacctgcatttagtaaaatagaatgggagggtgaagacaattattgagcaaatgtgtttagatgccgaaacgattaaagagaagatgaaggaaattgtggaggagaaaataaataatccacatttaaaagacacccttcagacttttataaatgaaaaaaatcattttgcttttggtgttcttgcatttaagcattatgtggctttcgatggtgagcattattcggatattacgttattagcttcaggaattgaattgttaattttagcttttgatatttttgacgatatagaggatgaagataacttggataaggaatggatgaagatagatcaatctatctctttaaatgcagccacttctctttattcaataagtcttcaagtgatttgtgagcttaaaacgaactccgattttccccggcttgctatgaaatatgctttaaatgcaatgcaaggtcagcataatgacctcgaaaatttccccgaaactgaagacgaatgtcttcaaatgattaaacaaaaatcaggctcgcttactgcaatgtcagctgtattaggaacaatgcttgcaaatggggagtttaacgaagaaattgagaattattcctataaaattggaattgttaaacagattgaaaatgattattatggtctttttaataaaaatcgtagtgatatcagaaagggaagaaaaacattaattctgttgtatctaaagcgaagatttaatgctgcttcagaaaaaatcttggatttaatgaatgcagaagcaagttaccattcattcctcattgataataaaaaaagccttgaagacctactatttgatgcaggagttagccagtatgtttcaatgttaattaaaatgtacgaggaagaaattacgacaagtataaaagatttaaatataatgttagaactttaatggaggaaattacagtgaagcaagatatcgtacattatcttatggaaaatccacttgtacttacaaagttagcgtgtggggaagctagtttaataggagttccggataaactgttacctgccattgttgagatttttgaaagggacttaagtcaatcaaaaaaatgcaggggaattttttgggaacaatgattgagagagtgagatctattgaaaaaattcattagaaatttttcgattgtattgttattcgtcagtctcttttacgtcgctcatattatatattttactcaaaacggaattttggtaggaacctatgtggttgaaaacaataaccatgaattgcaggttgtaaaactctccaagtctacgtatggtaaatatatgggcttaaaagagggagacaggataattgaaataagcggaaaaacaccgacagaagagaatataagaggtcaatatctagcgaaagctgaacatatgaaaataataaggggtaatagtaaaatagacttacataatactgagtttatttccttaaatagctcttatagtttttttatctatattatcccatgcatattatttgctttaagcatgttatgcattttttatatttataaagttaacagagtaaaagatacttattcagcctttattttgattatttttttattgtgtacatccattgcatatttaagcgcaggtggagtaactagaggatatgaaataaacagatatattaacctttttacatttttgaacgtacctgtattatactttcactttttgtatcaatactttaaagaattaaaattgaaattttcagctggttatgttgtgtctactctctatatattgccggttattaatataataatcgagatattccagaagcattttgccttccaacttgttacgaatattaatttagtaacattttttttggaaatgatggtcgtctatacatccattattttttatggactagtctaccgaaaaaaggatcacttttatttgctgaaagtattacttatatctaataccatagccttttttccgtttacagtattttatattatacctgaggtgttgttcggacagtatatttattctgctatagttacggcaccatttttaataattattccattagctttagtctatcaattcgtggtcaataaaatctacgatatagacttcttgttgggcagaattagatactatggtttcctttccattattccgactattggagttgtatggctgaatatattattcgacagcaaggggaataactttaacattattcaaatcactgtatatgtatttttgatttttttagcggtattttatattaaggagttattagactacaaatttcgcctgaaacgtttttcagaaaaatataattatcaagacagcatatttaaatatacacagcttcttaaaagcgtatcagctttaaaccaagtgtttatgaatcttaaaaagacgatattagatgtgttgcctgtcagtaaggcatatatctttgaaatcagttctgacggagatattctgtattttgataaacagaacagtgaaccgaactggcagccgtataaaaaagaatttgttaaagtctcatcagagattggcaagatttttgaagtaaatcaaggttttctgatgaagattggagaaagaggggcaaactcatacgttctgctttgtttgtcgagcattaatactccgagactgacaagagatgagatatcttggttaaagacattgtctttttatacaagtgtttcgatggaaaacatattgcagatcgaagaactcatgaaccatttacaagacctgaaacaacaaggctcaaacccggtctggctcaaaaagctgatgtttacgatcgaggaaaagcagcgttcggatttggcccgtgatctgcatgattcagtgctgcaggatttgatttctttgaagcgccagtgtgagctgtttctggccgattttaagaaagaggagccttgccagttagaggtgcaggacaagcttcatcagatgaatgagcagatgtcggatgtcattttgatgacccgggagacgtgccatgagcttcggcctcagctgctgtatgatttgggtctggtcaaggcggtatccaagcttgccgcgcagcagcaagagcgtgcgccgtttcatatccgtctgaatacgggccggtttacggcggcgctggatttggatacgcagctgaatttgtaccgcattattcaggaatttctttcgaacgccatgaagcattcacaggcgaatgaggtgctgattatgctgatcagcattcaaaataaagtgattctgcattatgaagacgacggtgtcggctgcaatcaggaagaaggcggcggacagtcgatgagcatgggtctttcgggtattaaggagcgcgtccgtgcgcttgacggacggatgaaaatcgacacaagtgaaggaaacggttttaaagcggatattgaaatggaattgtaaccattttatcaccaaatcgacttggcagaagccaagtctttttaataaaatggaaatgagtgagtaaaagggaggaaaccatgaaaaagatactagtgattgatgatcatccggctgtcatggagggcaccaagacgattctggaaacggacacgaatctttctgtcgattgcctcagtcctgatgccagtgaacaattcgttctccggcatgatttttcagcttacgatctcatattaatggatttaaatctgggtgatgacatcagcggcatcgagctttccaagaaaatcttaaaagagaatcctctctgtaaaatcattgtctacacaggctatgaggttgaagattattttgaagaatccatccgcgcgggcctgcatggcgccatcagcaaaaccgaatctaaagagaaaatcatgcaatacatatatcacgtgctcaacggacagattttagttgatttctcctatttcaaacagctgatgacccagcaaaaaacaaaaacgtcttcttcccctcaaagtgagcaggatcggttaaccccgagagagcgccatattctccaagaggtcgaaaaaggtttgaccaatcaggaaatcgcagatgcgcttcacttaagcaagcggtcgattgaatacagcctgacatccatttttaataagctgaatgtcggctcccgaactgaagcggtgctgatcgccaagtcagataacgtactataaatcttgaagggagaatgacctatgaatctgaacaatacattgctcggcgcactcggtattgaaatcactgaaaacacgccggagagatgcgtggcggtgatgccggtggataagaggacggtgcagcctttcggatatctgcatgggggcgcgtcagcagcgctggcggagactgctgcaagtgtcggggcccagcattttatcgaccggtcgaaacaggcgtgtgtcgggcttgagattaatgccaatcatttaaagtcagtgaaagagggcggaacggtcacggcgatagcggaacccgttcacacaggcagggcaaccattgtgtacgggattaacattttcgatgaacgagaaaggctgatctgtgtttcccgctgtacgctggctgttataacaaaataaacaaacagccggaaccctgaatcgtccggctgtttgtttttacaaatatgaatcttcttttcgtttgatcacaaagtttctgatccctttgtaatcatcctgaacgcttcttttatcaagcgccgctcccgaattgtacgcggccctgcatatgaggtgcgctccgaccggcgccgtcagcaggataaaaatgatgccgagcagtatttttacagaaatttctccggtcagcatccacaagtagcctaacaccccgagcaataccaaattaacgccgagtgtcgagccttttgaagaggcgtgggcgcgcgtatacacatcaggaagcctgagtgtgccgaaagacgcgaccaggcagatcagcgatcccatcagaatacaaacggcgacggcccatttaacgatttcgatcattttcgataatctctcctttctccaaaaacttagcaaaggcaatcgtgccgataaacgataaaatgccgagcagcagaatgatgtccaaaaaggccgatgtgtttaagagaatggatacaagcgcggtcatggcaatcagattaatgccgatcccatcaagcgcgacgacccggtccggtatcgtcggccctttcatgacgcgaatgacgtacagaagagtcgaaaccgccataatgccgagtgataattgcagaataaacgtaaacatcagcggctcacctcctgaatggctttttcaaaagagacgcggatgtcgtggatcgctttctccgcatcttcaatatccatggcgtgtatatagagaatcgaccggtcatcggagatatccatcacgagcgtacccggtgttaaagtgattaacagcgagagcaacgtgatctcccaatcctccgtcaattccgtcttaaacgcgaaaatgcccgggcggatgttcagtttcggcgctataacggttttcagcacgctgacattggccaaatataattcctttataaagatcagcaccagtctgatgactgaccatattttccaaatgtaaaacggccgcgagaagaagcgccggaaaaaaaacagcgccgccaagcctgcgataaatccggttataaaacccgccgtgctgaggctgtttgtgagaaacatccagcaaacagcgagaagaacgtttaataatagttgaaaagccatgccatctactccttcaaaacagcttcaatgtatttttccggattcagcagattctcagccgtctgattgacatacggtgaaacccattcggttccgagcccgaacagaagcgacaaaaggagaaaagcggctgccggataaagaagtccttttgcggaccgtccgcctgcgccggggatttctttttcttcgccccaaaaagccgtcgtaaaaaccttcagcaccgaatagagcacaagcaggcttgatacaagaatcaatacggaaaacaatgtttcccccttatcgaacccgccttccgcgatcttcagcttgcccacaaatccgctgaacggcgggatgccggccaaagatatggctgaaataaagaacatccatcctaaaacgggataacgggtgatcagtccgcccattttatgcaggctggcagtgcctgtcaatgcgataagcgtgccggcaagcataaacagcgctcctttaatcagcatatcgtgaatcaagtaataaaccgctccttgaatggaggccggcgtgttcatggcaatgccgaacaaaatcacgccgacggctgtaataatattgtagatgacgattttcatgacatccgaaaaggcgatagatccgattacgccgaatagcaccgtcagcatcgcaagccacatcatcaattggtgggtaaagcccgtatcgtgaataaagatcagggtgaatactcttaaaatggcatacaggccgactttcgtcaaaagagacccgaataaagccgaaattgcagccggcggggcgtaataagagcccggcatccagaaatacagcgggaatatcccgccctttaaaccgaaaacgacgagaagaaggatgccgatgacggttatcagcccggtctggcccgattcgcttatttttacgcttagatcagccatattcagcgtgcccgtcaccgcatataagtaaccgacaccgatgacaaaaaacgcggatgacacaatgttaaacacgatatacttcaatgattctcttaattgaattttcgttccgccaagcacgatcagcatgtaggacgcgataagcagaagctcaaaaaagacgtacatgttgaacaggtcacccgtcaaaaacgctccgcttacgccagccagaagaaactgcacccctgaataatagaaagcgcgctcccttttttctccgatggagcggaaggagtacagggtgacgagcagcccgattatggcggttgtcaaaacaagcagtgcggcaagctgatccgcggcgagcacaatgccgtacggcgctttccagccgccgagtgtcagcgtctgaatcccgtgtgtgaaaaccgtctgaacgagagcggcgctgatgacgatggagacacaggaagcggcagtgctgaatatccgcatcagcatcacgtgcctgttcataaaaatcagcagcactgcggcaagcagcggcaccagaataggcaatatcacaaagttattcatgttgatcatttcccctcattcgatccatatcgtccgttttcagttcctgataggcgcgaaacgccatcacaagcaggaaggacgtgacgccgaacgaaataacgatcgccgtcagtatgagtgcctgcggcagcggatcgacaaaggacgtgctttttccgcccagtatgggaggagcgccttttttcagtccgcccatggtcaggagcagcaaatggacgccgtggctcaaaagcgcggtgccgataatcacgcgcagcagacttttagaaagcagcaggtaggttgccgccataaacaaaataccggcaatgacagacattaagatttccactattcttcctctccaatcgtttgaataatggtcatcgtcacgccgacaacaacgagatacacacctaaatcaaacaaagtggccgtcgcaagctccgtattcccgagcaccgggagatgaaaatggccgaatgtatgggtgagaaagggcgctccgaataagaacgaacctgcacccgttgcaatcgcgataagcagacccgcgcccgccacataaataaaattgacgggcaaaatcgatttgacggtttttaaatcaaaggccaaaagcagcagcacgatggccgaagacgtaatcagtccgccgacaaatcctccgccgggggcgttatgccccgataaaaataaatagaaagagaaaagcagaatgataaaagatacaagcttcgttgccgtctgaaggatgatgtcgtttgtttttggctgtctcaacgcttttctccctcctctgttacttttgttctgatcatgccgtaaatcccgagtgcggcaatcgacagcaccgtaatttcaaacatcgtgtcaaatcccctgaaatcaacgaggatgacgttgacgatattgtttcctcccccgagcttatggctgtaagcggtgaaaaaggaggagatgctgtcttttgttttttcgctggaagacgcgattccgagcattgtcacgatgacgccgacaccgagagaaatgataaaattcgtcatccggaatgttcttgtcttctttttccgccgcattttcggcagatggtaaaaacaaagaagaaacaaggcgacggatatcgtctcaatgacgagctgcgtgagcgccagatcgggcgctctgaaaatcacgaaaaacagcgcgagtgtgtacccgacaacaccgagtgagataatggccgtcagccgtgatttggcgaacacagtcgcaatcgttgcgttcaccataacgagggacagcacgatttcatacaggccgatctcagccattcctttcgctgtcatggaaaagccgcctttcatgacgaacgccgctccgatgagaatgataaacgacgcaaagatatacagcagataatcccgcaaaaatccggtcatataagatgacgtcagctggtaagatcttttttccatactgcccgtcaccgcatcgtaaagcttgttcagcgtcagttttttcggaaacagaccgtacagacgctcccatttagacagcgttacgtaaccgatcgtgccgacaatgatgatgccgagggtcatcattacctcagccgtcaccccgtgccactgggaaatatggacatggaatgtatctccgccggttaacagagcgggataaatggagttcatcgccggttcaatcaggctgtaagacaaaacgttcggagcaaaaaacagactgacggcgcaagcggcaagaatcaccggcgaaatcagcatgccgagcggagcttcatgcggcgtcttttcaagctgatccgttttgcgcgcgccgctgaacgttctgaaaaacagcttcatgctgtagatgaaagtgaagacgctcccgatccatgcgagaacggggaacagcacgccccacgtatccaggctgaaaatatctgcatgagcaatccgcagcatacttgtaaagaacatttctttacttaaaaagccgttaaacggagggagaccggccatggaaaacgttccgatcagtgaaacggtgaacgttaccggcatgagcgccatcaggccgccgagcctgcggatatcccgcgttcccgtttcatggtcgataatgccggccgccataaataaacttcctttaaaagtagcatggttaattaagtgaaacacagccgcggtgacagccgccgtaaaatactctgaatgctcataatgaagcgcggcggctcctgcgccgagcatcgatacaatcataccgagctgactgactgtggaaaatgccagaatcgcttttaaatcggtttgtttaatcgcattaaaggaagcccataccatcgtgatcagaccgactgaggcaaccgtccaaaaccagacgggtgaaaaagcaaaaaccggactgaatctggcaatcagataaatacccgctttcaccattgtagccgagtgcagataggcgctgacaggagtcggcgcctccatggcatcaggaagccagatataaaacggaaactgcgctgattttgtaaaggcccccaataacaggagaaccatcgccggaataaagaacgggtggcctgcgataatatgcacctggttgaccatttccctgatactgaaagaatccgtcatcagatacagcaggataaagccgccgagcatgcacagcccgccgccgacggtaatcagcagtgatttttccgccccgtagcgtgatttcttccgcttatgccaatacccaattaataagaaggatgacaggcttgtcagctcccagaacatataaagcacgatgacgttatcgacgagcacaacgccgagcatcgcgcccataaacatcagcaggtacacataaaaagggccgagcttttctttgtccttcgataagtaaaaaatactgtaaagcgtcaccaaagagccgatgcccgtaatcaataaagcgaataacagcccgagtccgtcaatataaacggtatagttaataccgagggacggaatccattcggccgcataccggacggtttctccagccattgtgacagggagcttgctgataaagtaaacaaacagcacaacgggcactatcagcacaaaccagcctgtatggacttgttttacccgtttataaagaaagggaacgataaatgcaaataaaaaaggcgccaaaatcgcgaaatgtaacagctgcaacagaagacctcctttgcttgttttttcatcaagcaactgctttatgtaagaatgaatcaatcaattcacggtcataggacccagtacaaattatatcgcacttttttttaccctgctacggcataatgtattcctctttgtgtttttgtggtcttttgaacccaaaataaatttatcaaatatccggatctttgtatatacatttctttttcagatcaagctttacaaaaggagctggtcagatgaagagaaaggcggcggcctgtattggaatattttgttctattattgcaggaacattcatagttgatgatttctgcaaaacgcggcagcagacggaagcagatgattgggagcatttttttctcggtgcggaatacgcagaagacaagctgagtgcggctgaatcaatgcaaacgccgtttcagccgcgtgagtatatcagaatcgtatatagatgaaaagagttccggcaccagggtgcggaactctttttgtgtggcaatcagcgttttcctttaatataagggatgccgttggctttaggcgcatccgcgcggccgatgaagccggcaagcgcgagaatggtcagaatgtaaggagccatcagcatgtatacattcggaatgtctttgaacaggggcaaaagcgagccgataatgctcaaactctgcgcaaacccgaagaacagcgcagccccgagcgcgccgatcggatgccatttgccgaaaaccagcgcggcgagagcgataaagccttgtccggaaatggtggagtgcgtgaaatcaagcgcgatcgtggaagcatacacaccgccgccgagcccgccgaacagcccgctgatcatgacgccgatatagcgcatgccgaacacgttgattcccatcgtatcggccgccatcggatgttccccgacagaacggatgcgaaggccgaacggcgttttgaataaaataaaccaggaaacaaaggccagtacgatggctaaaatcgacgtataatatacgtctgaaaagaaaatctttcctaaaaccggaatatcgcttaacccgggaatgttcgttttgtaaaagggctccgggattttatcagtctgcgcctttccgtaaatcagtttgacgataaacagtgtcgctcctaacgcgagcatattgatcgccacaccggttaccgtctgatcggcgcggaaagaaaccgcggcagccgcgtggatcagtgagaacagtccgccggcaatcatagccgcagccagagcgagccacggagcggcggcgccaagctcgcgtccgaaaaataagttgaacatgacgcttgtaaaggcgccgataatcatcagtccttcaagaccgatgttgacaacccccgatctttcagaaaacacgccgccgagagcggttaaaataagcggagccgcatatacgagtgttgccggaacaataatggataaaatctgcaggaagtccacttacttcgccccctttttcttcaatttatcaaggatgagacggatggcgtagcttgatgccacaaacaaaataataatggcgatgacgatgtcaacgacttcagaaggcaccccggattcaatcggcatatttaatgccccgactttaaggccgccgagaagacatgccgccagaacaacgccgattgccgtgctgccgccgagaagcgcaaccgcaatgccgtcgaagccgacgccggtaaaggcgcccttaaccgccgcatattgaaaggttccgagtccttccatcgcgccggcaagccctgcgaaggccccggaaatcatcatggcgtacatcatattttttctgacgctcattccggcgtattgtgcggcgtgctggttaaagccgacagcccggaattcaaatccgctttttgttttatgaatgataaaccacatgaggactgccgcaaacagagcgatcagaatgccccaatgaaggcgggagtaatctgtcagctgctctaaaaacggcgagcggagcgacgcgctttcatgaattttgtctgttttgtcccggtggtccgtcatgacatcggaaatgagataattggttaaatgaagagcgatataattcatcatgatcgtgacaatcacttcgtggacaaaaaaacgggcttttaaaaatccgggaatcaggccccaaatgccgcccgcagccgcagccgccaataacgaaagcggaaggtggatgtaagcggggcgtcaaaggaaacgccgacccacaccgcggcggtccagccgacaaggagctgtccttcaaccccgatattaaacaggccggtccgaaatgcgaatgccacggccaatccggacagaatatatggcgtaatctgccggatcgattccccgatgtaatacacttcaccgaaaatgccgctccaaagagccgaatacccgcttacgacattgtagccgctggcgagcatgatgaccgcacccgcagctaatccaaggatgatcgcaatcagcggcacagccagatgagaaagtcgattaatcatgtgttttccccgcctccatttgcttacttcccgccattaaaagtccgagctcctgctcgtttgtttcaagcggattgacgtttgcgatgatgctgccttcaaagatgacggcgatgcgatcgctgagattcattatttcatcaagttcaaaagataacagaagcaccgctttaccggcgtcacgctgctcaatgagctttttatggacgaattcaatcgcgccgacatcgagtccccgcgtcggctgggccgcaattaaaagatccggatttctgtccacttcccggccgataatggccttttgctgattccccccggagagagcgcgcgcaggcgtatattcatcaggtgtcctgacatcgtattcttcaatcaggcttcgcgctttgtcataaatcgtgtgtttatttaatatgccgaaagaagagtagggcttttggtaataactttgcagcacgatattttctccgatcggaaaatcaaggacgagcccgtgtttatgtctgtcctgcggaatatgcccgattccggcttcagtgactttcctgggcggcatattttgcagctgtttgccgtttaacatgatcgtgccggcatttgtttttctgagacctgtaatggcttcaattaattcagactggccgtttccgtcaacgcccgcaatgccgacgatttcaccggctctgacagagagggagagctgtttgaccgcctcaacgccgcgcgcgtctttcaccgttacatcagaaagcgaaagcacttcttgtttcggttcagccggctgtttatccgtcttgaatgacacttcgcgtccgaccataaggcttgccagttcatcttgatccgtatgtgcgacatcaagtgttgtaatgccttttcctttccggatgatggtgacacggtcgcagacttccataatctcttttaatttgtgggtgatgaggataattgattttccttcattgacaagatttttcataatctgaatcagttcttgaatttcgtgcggagtcagcaccgcggtcggctcgtcaaaaatgagaatgtcggcgccccggtagagggtctttaatatttccgcccgctgctgcataccgacggagatatcggcaactttggcttcaggatcaatgtgcaggccgtaacggtcggaaatatcacgcacgtcccgggcggcgcgctgtctgtcaattcggccgaaagttttcggctcttttccgagaatgatattttctgagacggtgaaggtatccacaagcataaaatgctggtgcaccatcccgatgccgagatcgttggctttgttcggactgttgatgtgaacgcgttcgccacgcacccggatctcgcctttttccggctgatacaggccgaataaaacgttcatgagtgtcgattttccggcgccgttttcaccgagaagggcgtgtatttcgccttttttcacttgaagcgtgacgtcatcattggcgacgattccgggaaattccttgcgtatattaagcatttcaatgatataatccaccgatttgtcgctccttttcagagatactttgatgagaaagagcttggcaaaagaaaagctgcaagagatgcagcttttccttcaccgctcttttcaaaaaagagaggggataagcacgaaagtctccttatcccctggttcttactcagccttgaaggatttcaattctttttcagttgaagggatcacgagtccgtccgcgattttcttcttccaatcgtctgttgctttgatgacatcgtcagaaaggttctccttgtgatccgagatgccgactgcatcttgcgccaaaccgtatgttaatgttttgccgcccgggaatttaccgtcactcgcttttttcgttaagtcctccacggcagtatccacttttttgaccattgatgtgagagtgacattgtcttttgttcctttgacttggccttccgcgtactggtctttatcgacaccgataacccatacgttccgcttcggatcttcttttttcagatttttcgcttctgtgaagacgcccgttcccgttgcgccggccgcgtgataaatgacgtcaacgcctgatttgtacatgctttcagccgtcgccttgccgacatcggctttgtcaaacccgcccgcatatttcacttcgacggtcgctttcggatttgcggcttgtacacccgcgcggaagccgatttcaaattttttgatcaattcggactccattccgcccacgaatccgacttttcccgttttgctcgatagcgcagcggccgctcccacgaggaatgaaccttcctgttccttaaatgtaaggctcgccacgttgtcttttttgacaacggcgtcaatgatcgcaaaatgtgtgtctttgcgctgatcggcgatttcgctgatggaatcctgcatcagatacccgacgccgtaaatcaggtcaaagtgttcccgcgctaatttatttaagttcgttgtataatctgcatctgattttgattgaagatagtcaaaaccgcttttgccttttttaagcccgttgtcttttccgaatgcctggatgccttcccaggcggactggttaaatgatttgtcatcaacaccgccgatatccgttaccatgccgacggtaaagtttttgctgccggagccgtttgctttgtcacttgaaccgcatgcgcttaatatggttccggccgctgcgatgagcgccatcgccattccgattttgcgttttttcaaagatataacccccctgtaaaatatggctgtgccgttcaattcagacttgagtccccgtgccggatgcagaatcgaaaaaactttctgataataatgatgagacgtctctctttttcccgccttgagcggctgtctcttccgggttcgggacttatgacttatctgaaaagatctgctaaccaatcataatttatcattttacccgccataaataaatagaaatttgcttattttttaaaaaatatcaattttatgaatcggcttcctcatctggttaaaacagaggaggatcagccgggtcattatccttatatagcatatcaaaaaggaatctcaagccttttgtcacgggatatgacagtaaaaaagcaccgttcacagcgaaacggcgctttttgacattataaatattgtttgatgctgctgacattgccggtgttgatatgatattgaaagacgggtctgccgatcgtgccgtacgccatctctacattcagcacttgtatgtcttccagaaatttaaggtatttccggatggagacttgcgagatttcagtatgcttggcgagatcttccgtggtaaaagagccgtcgccgaaagactcaatgctcgcccagatgagtttaagcgtgctctttgtcaatcccttcggaaggtgaaccttttccgccgcttctttcttttgaaaaagctcggcatccaattctttctgtgtcatgcttctgtgtgattgataaactttctgcttgcgtctgtagtcggaaagagcggtttgaaagcggtcaaattcaaatggtttgattaaataatcgacggcgccgtaccgaagcgtttttttaatgacgtccagctcgcttgcggccgaaatgacgatgacatcaaccgattcattctgcttgcggatttccgttaaaagctcaagcccgttttttcccggcatgtaaatgtcaagaaggatgagatcgatatgatgctcgctcagcacgtgcagcgcgctttgaaaggatgatgcgatccctttcagctgaaatccttcaatctggctgagatagcgcttatttaattcacccaccatggggtcgtcttcaactatgagtacattaatcatcattttcctccttcggttcatacggaatgcgaagactgaaagtcgttccttcattcttttcacttgtcacaatcatatggccttttaaattttctgttgcctgctgggtgaaatagaggccgaacccccggtttgtccctttcgtggaataaccttgttcaaaaatacgggcttggtctgccgcagacattccggctcccgtgtccgtaatctctatgtcaagctggcgatcctgaaaccgcatcgagcacgtaatgttttttttcggcatctgcgccaccgcgtcgagcgcgttgtttaacaggtttccgataatcgtaatgagctcatggatgacggccggatccgccgcattcggaatcaggctgccgagctgaatgtccagatcagcgccctgctcgcgtatgtagctttgttttcccagaagaaaccctgcgagaaccggacttttgacatcacttataatctcgcttgtttccgtcttctgctgaatggcaatgtctttaatgtaagtgccgagatcatcgtattcttttaactggacaagccctaaaatgacatgaagcttattcatgaattcgtgagactgggctcttaatgcgtttgcatacattttaacaccggacagctgttctgctaaatgtttgacctccgttttgtccctgaacgtggcgatcgctccgacggtttgtcctttcagatgaatcggaacttcattaaagaccagctcaagtccgttaatgcggatatctctgtcctgaagcggttttttcgtttcaatcacctgtttcagccggcttttcgggagaatatcgttcacatcttgatcgaccggattagtcggaatacccattttaataaaaagtcgtttcgcctctgcattggcaagcttaatttttccccgcgcgtcaaccgcaaggatgccttccttcgttgattcgagcatggcgctccgctcttccaggagggtggcgatttcataaggctcaagaccgtacataatgtttttgacggtgcgggcgacaatgacggctccgatgacgccgacaaaaatacttacgcagatgatgaaataaagcggtctcaaactgtggctgacgacatcctgtattttgttaagcgaaattccgaccgaaacgacgcccacttgttttttatcttttccatagatcggtacgaaggctctcatggattttccgagagttcccgctgatgtgctcgttttgatatggccgtgcaacgccggctgttcgtctccgccggtgaatttcttcccgattttatttgcgtcggggtgggtgaggcggatgctgttcatatccatcaccacgacaaattcggttcctgtcgtatgctggacatccagtgtataattccggagctctttcagcccttttcttgtttgcaatgcctgcgcgacactcggtgtttccgcgacaagctttgcggtgcgcagcgcggttgtccgttcttcttctttcacgcggtccgcggtctggacgctgatcgtgaaaaaggtgatacaaagtgcgataaggacgacaatacagacgaatatcgttaaccgggtttgcaattttaatgtttttttcataacagccttccttacgtttatcattcccgcgttctactttactccgaaaaagccggtttgtgaagatcaggcccttatttcgtaaaagtgaggaaaaatggaattttttatcttgtcaatgtgttttaagtcctccataataagtgaggtagattacagaaagggactttttatatgaaaaatacttattggacgggttattttccgctcgttgcgattctgctttttagttcgtcattatccatttctacctcgctttatgtcatgaagatacttcagacgctcggcatgtatcaggggatgctggattatttctctgagaaagggatcagactggcgctttttgcagcgttcgcccttgtgtattttatgcttttttcggctttgaagctgattgcaaacacagtgacagagctgtctcttttgtttttcacaaatgaccctgagggggacaatctgaaaaaaatcagattaggctctttaatttatgtaggcggaggaattctttcctttgcgttcgtgcagaatggtttttggattgcggcgttatttgccgttgttacgctcatttatttgattttcatggtgtacagaatctattcgacactctcgatcgtttcgctgatcggttttatattgcttgagattctgttttggtttacttttgttatcggtattttgtacatctttatcaagctttataatagcataatggctagcttacctgtgtaagctagccatttttgttaagacagaaatctgtttttgatctcaggggaggggagcatgcatgcttccctttttccgaaccatttgtaacggcgccgggcgatgaaagaataggctctgtccctgaggggcggggcactgcgaaaaaaaccgctgacagccgccaggctccgcggagatgacgcgaaacctttaacacggctgcggattttttgtatatccgcccgttttcgataaaaatcatgctgtcaaattgttctgtcggaagtccttctgatgccaaaagctcccgggcggtatctgattgcaatgaagcaaatgagattttgccggccggatcgcgtttaatgatgaattgaacggcgccgctgcataagttgcagacgccgtcaaacaaaagcacgcggtccggaagctgagctggtttcaaagcggatcccctccgttatctttaataagctgcctgcagcgtgtttttccagatcgaaagctgagggcttgcgtcatgaaggtattcgacgcttgacggtgtatccttgccgacccataccccatcgtataagcgtccgtcaggccgacaaaccacatatcgtgatagtcatttgacgttcctgattttccgccgacgtacggagctttaaagttcgctttttttcctgttccgcttttgacgacggctttcatcatttctttgatctgcatgttggtccgcacgctgaatacctgcgccggctcatctttccattttaatatcgtttttccttttaaatcagtcacttttgtaatcgcgtgactcggcgtataaacgccgttgttgccgaacgtggtgtacgcattggtcatttcaagcggcgtcatgccgtttgtaaaaccgcccagcgccgcaggcaggcggtaatccgcgctgaccagcttcgcgaaatgaaacggttcaaggtagctgaacgccttattgacgccgacgcggtccatgattctgatggccggtgtgttgtacgagtatttaaacgccgtttccagcgtaaccgtgccgtatgtgcggttattatagttctgcgggcagtaatccgcactgcagaatttgcttgcgtcaattttgctgtgtggcgttgcgccggtcttttcaatgtaaggtccgtaatcaagcagcggcttaatggatgaaccgggctgtctgtatgcttgataggcgcggttgaaatcatatttatgataatctttcccgcctgaaagcgcgataatctgatgtgtctgatgattaatcacggccgctccgccctggacgcctgcatacggcagattttgattcacttgggcgacgacctggttttgcatatacggattcagcgccgtataaatcttcacgccgtcttttaacaatgtgctgactctgtcggaaagctcactctgtattttttgtttcgcctttccggaagctttttcaagacgtttgtcatagccttcggatgaggaaacaagctgtgtgaattcatcatttacataggaaacatagtcaggatatttatttgttttttcgtttatatcaagcttgatcttttccttttcggcttttttcagctgtttcccggatataacgcctgcttttttcaatccgttaagcaatctgacttgtcgttttttcgtataatcaaaatgcttgagaggatcatataatgtagggttattagggatggcgcagataaaggccatctctcccaaagtgagagatttcagcggcttgctgaaataaaattgtgccgccgaaccgacaccgtatacaccgttattaaaataaatcgtatttaagtagccttctaaaatctcatctttgctgtattttttctcaagctgataggaataggccagctccgtcagttttcggctgaaggtgcgttcatggcttaaatacacattccttgccagctgctgggtgatggtgctggcgccctggtcaattttatgatctttgaaattggaggcggccgccctgaccatccccataaagtcaaaccctttatgctcataaaaatggcggtcttcagaggttaaaaacagctgttttacctcattcggtattttattaaagggcacgatcacgcggttctcatgatcgctgacaatctcagaaacaaggcttccgtccctgtcatacatgtaactgttttgaaccaggttgatcgcttttaaatcaatatgtttatcgagcacctgatcaaaaggcttgatttgttttacctctttgccggaagcaataactgtaaatgcacacaacgggataatgccgagcagcaaaatccatccgattattttacgtaccatggtcactctcttttctcctgatttctagccatatcgtatcattcttttaagaatacgagaaggttaaatttagaagaaatcgtgatcgctgccggtcagcccgcatttgacgctgtatccttttgcagatgtcccgccatccataaaagccccgcgcctataaaaaagagaaaggcggtgacgtagaaagcagccgaaatagaaaaaccgcttgagaccgcacctccgagcagagggccgagcacgtttccgagaaaacgaaagctgacgttatatccgagcacctctccctggatgctgcccggagccctgacgcggatcgcggccgtaatgcaggggagcgtgccgcccatgaccatgccgaacagaaatctgaagactaacagaatggagagggaggaggcgagcgcctgcggaataaaaaacaccgctgatgcaatcaaaagcacgattaagatccggctgtggccgaagcggtcgccgaagtcccccatttccgggcaagcaataagcttccgagtccggtcgctgaaaacgccattccggagaaaaaggctaaattaacaggtccgtgcagctcattgacatataaagcgagcagcggctggatgctgaaattgccggtctgcacgatcatggtaagcaccatcatcgcccaaagcgcgggctggtgaaaaatataggagagcacctgttttctggaataggttttccgcttgttttgtttctcgccgagcggctgctcattcacctgaaataaaacgagaagcacagatgcgaaaatgacaaaagacgtaataaaaaatgtgtacgtaaatccgaagctgtcagcgagcagcccgcccagcatcggtccgaataaagtgcctgacacctgacccatctgcagcgtgccgagcgttttcccggcagtctctttcggcgtctgcgccgaaatcatggcaagcgaagtcggaacaaagcccgttacaaggcccataagcagccggaggacaaacagctgataaacggatgtcacaaaccccatcaataaaatgctgacggcaatgccggtgcctgtgatcaagagaatttttttgtagccgcgcttatcgccgaatctgccccaaaacggggaaatcacaaacgccattaaaaacgtgacgccgaacacatacccgctccatctctgcacatacccgcccgaatgggggctgatcgtttcgatatataacgaaagaaacggaacaatcatggtcatgctggcggaaataaagaaatttgtaatccaaatgacgacgaagttcttcttacggacagaaataacatcaccttctttaattttcgtgtgtctaatcattagtatataggaatgaatccggtatttgtattttcgatgcggatataggaaaattcattatttttagaaaatgaagaaagtttcagaggggaaactgatatactatcataaaatatcatttttgatcggaggaaaggcaggtgtaaaaaagtggatcagcgcagtctgctcattattgattttgaatttacgatgcctgacggaaaatacagcccgcaaaatttctttcccgagattattgaagcggggattgtcaagacggtgaatgatgaagtgactgaaacgttttcgagttatatcaaaccgaaaaaatttccaaagctgacgaaacgatgcaaaacctttctgaacatcacccaaaaagacgtggacggcggaatcacgtttaatgaattcatccgcaaattaaatgagcttgatcctgataaaaactgcacgatcgtcacctggggcaatatggatatgaaagtgttaaagcaaaattgcatgtttaaccacatcccttttccgttcaaaggagaacttcgggatctgtccctagaatataaaaacttctttggcgacagaacattgaccggcctttggaaagcggcggaagagtatggcgataaagggacgggcacgcatcataaagcgctggatgatgcgcggacgacatacaaattattcaagcttgtcgagcgggataaacaatatcttgaaaaaccgaaacccccgacgatcggtgatcgcgtcgatctgactgaactgtttcgacgggccacataaaaaaacccaatcatgccgactgggtcaagttcttttaaaatagtcacgctctaacgcggccaagttggcgagcgaacgttccgcccattctgagccgtccgctgtaagctgatctttcagccgggcagacgccgcttgtaaggaagccgtataatcaggaacttcgccatcaaacggtttgaccatctgatgcggtatgtttgtctgttccccgaatgcaagcgctcttctttcatgaaagaacggaacatccgcctgcttcggatgatgaagatctccttgagcgggatgcgtcagaacggctttaattttcactaaatagtgattgggcctgacgtctgtcacttcccctatgtatgctcctgttttataaaacccttttacgattgtgccgatttcaaacgaattcatagcgttcacctctctctagttattctataaaagatcaacgcgattggctagtgaacagctgccggaagcctgactgaagccgttgtgcccgagtgctcgccgctggtgaaatagacggagccttcatgatgctgaataatcgagaatgtcacggtaagcccgagcccggtgccattcgttttcagcgtataatacggtttgccgagtttctgcagttcttcatcggacatgccgattccgttatccgtaatctgaatgagaatcatctcttcctgtttttggacggagacctcgattcggccgttttcagagggcacggcttcaatactgtttttaatcagattaatgaaggcctgtttcagtttttttacatcgccgaacacatataaatcaggctcgctttgaacagtcacggtcaccgatttaaaattagcataagactccattaaggaacctgtttcctttacaagcagagaaatatcaaacttttctttttcatagtcatcctgcttcgccatatcgagataattcgtaatgatcgtctgagcccggtcgagttcggacagcacaagtttctgatatccggagtgggatttgtcctgaagctgctcgccgctgaacagcagctgcacaaaacctctgacgaccgtaagcggattgcggacttcatgggcgacgcttgccgcaagctcgctgacgacggccattttttctgagtgaatcagccttgcccgcatggacgcattctcatcaatgatctcaatcaaataaatgcacagcaaaagggcgctgacttgaaaaaaaacggatactgccgcctcataataaacggaagatagattttgaaaattgaaaatattggtcgcggaatagatgaagacagatgcggttaataaggcggtttcagtgcagccgatgagaagagcgaaaagcagtttcttccgctttgagaaaaaaggccatttcgtttggagctggatagggatgatgattaaaaaaggaattaaggataagaaaaaaagagcggaaggttcaaaccatatgagctgaaaaaaaacggatgctgcccctgcggcaagtcctgctgcggtaccggaataaagcaggcagacgataatgggaatcagctgcaaaccgtaacggacggaatgaagctcctggatgggaaaagccgtacataataaggaagatgacgctgcaaatacggcgaccagcaggcggttcgctctcggcacaagcaaatcgggcttgctgagccagaagacttgatagagaaaaatagggaataaaataaaagagaagtgaagcaggtaatcctttacaatctccatttatgcgaaatcctttcctatgtaaatatgaatctattataacatctttaccggcaaaaaaagtatttatttctctaaagcgaacgcccttatctcatctgataaaggcgttctttccgctgctaagagagcgctgctttcattctcttaagcccttcttttacggcggcggctgaacagccgacattaagtctcataaatccttcgccgcccggtccgtatttcgttcccggctctaatatgattttcccttttttgagcattctttctttgagctcggcatccgaaaatccgtatccgctgaaatccatccagatcaaataggaagcgtcaggtttcatcatgcggactttcggcaattcttttcttaaaaagtcctcagccaatttcatattcctttcaatgtaaggaatcagtgcgtcaagccaagggcctccctttgtataagccgcttcgattgctgcaaccgcaaatgtgttgaggctggaaatcccgttctgatgcaatgcggcggagaatttcgcccgcttataacggtcgggaatgataatggcggatgcctgaatgccggcaatattaaacgtcttgctcggcgcgacacaagtaatggaaatccgcgcaaactcctcagacagagaagcaaaaggcgtatgcggctttccgtacagcatcaagtcggaatgtatctcgtcagaaacgacggtgacgttatgagcggcgcacagcgatccgagctgcataagctcatcccggctccacgctctgccggacggattgtggggattacaaagaatcatcagcttgacctcagaatcgctcagctttttctcaagatcctcaaaatccatgcagtagacgccgttctcttcccgtaatgggttatgtaaaacctgccgtttgttttccttgatcatctgataaaaaggcgtatacaccggtgattgaatcaacaccggatcgcccggttcggtaaaggcttgtactgccatgctgattgccgtgacaaccccgggactgaacgtgatgcttgcgggatcgggccggtagccgtgccgtgtctcaagccatgaagcgacggcttctcttgtgttttcgtcaggagacgtataaccgaatatgccgtggtcaaggcgggcttttaaggcgtcagtgaccgcttcgggagcgcggaaatccatatcggcaacccacatcggaagtgcatccgatacgccgaataacgcttccgccttgtcccatttcaccgattgtgtgccaagacggttttctcgaagatcaaagttcatgtatgtcactcctgtagtatcattattttgcacagcgtatctatgataaaatagatttgcaaactttattataagcggtgatgaaaatggaagaaagccaagcggtcatggaaatgatgaaaatcattgccaagtgggacccatttaaatatggagaagatttttatgagacagaagccgtcgacatcgttcaggccgtctacagtgaagaccgtgccgacaagctggcagcagccattcaggatatctttgaagcttcatttgagcaaaagctaccgatcgaaggctgccaaaaggccgccgagcagcttctgttcataaaagaaagcagctcctgcaccccttaaaaaccggcggttccgccggttttttttattgaataaattcaaaaatccgttccgaaacaaactccgggcgctcttcgggtacgaggtgtcccgtatccttgagtgaatacagaatggaatccggcaggtcgtcatgaagccgttttccgactgagaccggaacgacccggtcttcttctccccatattaaaagagcggggttttgcactttcttcaaatcctcgggctctaaatcgccctccctgtgtctgatgaaccttgtcatcgctttgaaaatctggcggtctgtaaatggtttttcgtaaccgtcaatcatttcctgatcgataagcgtccggtcgtgaacgacatttaacaggtttttcagcacaccgtcttttgaaagccaatacttaagatacaggtcaaaacaagggaggtgcgtcccgaatataatcgacgggtgcgagcgctttaaataccccgagctgcacagcaggacgattttagaaaaaagctcgggtctgagaagagacgcggataaggaaatctggccgcccatcgaatggccgatgagtgcggcccggctgataccgagcttttccagaagtccgatcagaagcttggcgaggtttgcgtaagtatatacgaaagtccgtgacttttccgattgcccgaaaggaggcaggtcaacggcgataatatcataatggtttctgagcagcgggatcagttttctgaagctgaatgccgaagataaaaaaccgtgtacgcagacgagtgtctgtctgccgggattttcataatgctcgtaatacagttcaactccgtctatcgcggcccgtttaatcggtgaaacagcttccatgagagccttcgccgtcctttctttgttgtaatgtaaaggcttttttgattgtcagattttagttctggtttctttcgggtttttcttagcatttgtcgaaaatcgtgatataatgtcatgaagatttttgataatgcaaaggtgtgaaacgtatgaagctgacggaaaaagaaacagaaatattagaaattttagacgaaaacagccgcgttgatgcggaaacgatcgcgaaaatggcgaacattcccgccgaagaagtcaaaagcatcattgaaaagcttgaaaaggaaaaagtcatcattgattatgcggcgatgatcgactggcgcaaagtcgacggtttggaaggcgtcacggcgatgattgacgtaaaagtcactccgaaacgaaatgtcggctttgatgaagtcgctgaacggatatacagattccaggaagttgaatcagtgtacctgatgtcaggggtgtatgacttatctgtcgttattcgcggcaacacgatgtcagacgtggcaagcttcgtgtctgaaaaattgtccacccttgagtccgtcgtttccacgacgacgcactttatcctgaaaaaatataagcatgacggcaaagtctttgaaagcggagacgatgacaaaagaatcgtggtgtctccgtaaatggaaacgaagacttcttatttatctgactacgtgcagcagattaaaccgtcaggcatccgcaaattctttgatctggctgctacgatggaaggcgtcatttcactgggagtgggagagcctgactttgtgacggcctggaacgtgagggaagcgagtattctttctttagaacagggttatacggcttatacggcaaatgcgggtctttatgaactgagagaagaaatcagccgctatttagatcagcggttcggcctgagttattcgcctgacagtgaactgattgttacggtaggggcaagccaggcgcttgatctcgctgtccgcgccattatgaatcccggagaggaaatgttaattcccgaaccgtgttttgtcgcatatgaatcactcgtgaccctgacgggggcgaagccggtgccgattcagactgtagctgcaaaaggtttcaaagcatcagcagccgattttgaagcggccctgacggacaaaacaaaagcgctgcttctatgctcgccgtcaaatccgactggttccgtctattcgaaagaagagcttgaatccatcgcttccttcgctgaaaaacatgacttgatcgtgcttgccgatgaaatttatgccgagctgacgtatgatgagccattcacgagcatgggagccatccgcggcatgaaggaacgcacgattttgatttcaggtttctccaaagcgtttgccatgacggggtggagactcgggtttacggcggcgcctcccgtgatcagggatgccatgctcaaaattcatcagcacgcgatgatgtgcgcgccttccatggctcagtacgcggcgcttgaagggctgaaaaacggtcaggaagacgtcgaaagaatgaaaaaaagctaccggagacgccgaaacctgattgtggaaacattgaacgaaatcggactcggctgccaccaccccggcggagcgttttacgcctttccttccattcagtcgaccggcatgagttcagaagaattcgcggaacagctgctcattgaagaaaaagtagccgtcgttccggggaatgtattcggcccgagcggcgaaggctacatcagatgttcctatgcgacatccattgagcagattcaggaagcgctcgtcagaatcaaacggtttgttgaaaaaagggcataaaaaaagatacgaacccggttcgcatccaaataaaaggggggaatactagaaagccttcgtaatcatagtataccccctttatctgcgcttaaacatgatgatgtaaaaaagttctctttgcgaaaaacaaacttgtatgatataattttaaattgcgtataatctgtatttaatttaacttaggagttgttatgaatggcagcaaaatttgaagtgggcagtgtttacactggtaaagtaacaggattacaagcgtatggtgcgtttgttgcattagatgaagaaactcaaggacttgttcacatttctgaagtcactcacggtttcgtaaaagacattaatgaacacctttctatcggtgacgaagtacaagtaaaagtacttgcagttgacgaagaaaaaggcaaaatcagcctttctatccgtgcgactcaagcggcgcctgaaagaaaagaaagcaaaccaagaaaaccgaaagcggcacaagtttctgaagaaacatctgctccgcaaggtttcaacacattgaaagataagcttgaagagtggattgaacagtccaaccgcaaagaccttatcaaaaaataaccatcaaaaaaagcaccggatatgtatgttcggtgctttttttatgtttatctgacttccggatttgccgcttcctcgcgggatgtttcttcgttcggcttaaacagcaggccgagattgatcagaccggcgatgccgacaagaccgtaaataatccgcgacagagctgatccttggccgccgaagatggctgctactaaatcaaattggaaaaatccgatcagtccccagttaatagcgccgataatcgttaatacgagacagatacgctgaataacactcatgtaaacaacctcctctataaattcgtgaaacagttatagattgtgacaaagcaaagaatctatgcatactacattctccgccgtgtaaatcacacactgtctcaagctgtacaagtgcctttcccgggaaaccgctgtctgtaaaccgtgtgatgtgccgtcaaaaaagcggattgctttacattgaacgtcaactttctgcataatataaatccaaaggaggagatgtcatgcaaaactttacatattggaatccgaccaaattgattttcggaaagggagaggtcgaaaaacttcctgaagaaatcaagccgtacggaaagaacgtactgctcgtatacggaggcggcagcattaagcgcagcggtctttatgatcaagtaaccgacctgctgaaaaaagcaggagttaccgtacatgaattggcaggcgtagagccgaatccgcgtgtctcaacggtgaacaaaggtgttgcgatctgtaaagaaaacagcatcgatttcttattggccgtcggcggcggaagtgtcattgactgcacgaaagccatcgcggcgggcgctaaatatgacggcgacgcgtgggatatcgtcacgaaaaaacaccagccgaaagaagcgctgccgttcggaacagtgctgacacttgcggcgaccggttcagagatgaactccggatcagtcatcacaaactgggagacacaagagaaatacggatgggggagcccgctcgtttaccctaaattctctattctcgatccggtaaacacatttaccgttccgaaagaccacaccatttacggcatggtcgatatgatgagccatgtgtttgaacaatatttccaccacacgtcaaacacgccgtatcaggaccggatgtgtgaatcgcttctgcgcacggtgattgaaacagcgccgaagctgatcaacgatctggagaactatgagcttcgtgagacgattttatatacaggcacgatcgcattaaacggaatgctgtcaatgggcgcaagaggggattgggccacacacaacatcgagcatgcggtatcagcggtatacgatataccgcacgccggaggtttagcgattctgttcccgaactggatgagacatgtgctcaaagaaaatccggcccgctttaaacagcttgccgtccgtgttttcgatattgacgagacaggcaaatcagatgaagagatcgcacttgaaggaatcagcaggctgtctgaattctggacgagcctcggcgctccgaacagactcgctgattacgatatttctgatgagaagctggatacgattgcagataaagcgatggcaaacggagcattcggacagttcaagtcactgcagaaagaagatgtgcttgcgatactgaaagcatcattgtaataacataaaggggggcggccggattggcagctcctttttttctgtgttatagtaattcccttacgatttttttggaggtcatgataaatggagaactttacgtactgcaatccgacgaaactgattttcggaaaaggtcaaatcgaccaattgaaaaaagagctgaagcaatacgggaaaaacgtgctgcttgtttacggaggcggcagcattaagcgaaacggcctgtatgaccaagtaacaggcattttaaaagaagaaggcgcagccgttcatgaacttgcgggcgttgaaccgaacccgcgtctggaaacggtaaataaaggaattgagctgtgcagacagcatgagattgatttccttctcgcagtcggcggcggaagtgtcatcgactgtacaaaagcgattgcggccggtgcgaaatatgacggcgacgcatgggacatttacagcaaaaaagtaacggcgcaggacgcgctcccgttcggcacggtgctgacgcttgcggcgacaggctctgaaatgaaccctgattccgttatcacaaattgggaaacaaacgaaaaattcgtatggggcagcaatgtcactcatccgcgtttctccattttagatcccgagaatactttcagcgttccggaaaaccaaaccgtatacggcatggtggatatgatgagccacgtatttgaacaatacttccacaatgttgaaaacacgccgcttcaggacagaatgtgttttgcggtccttcagacggtaattgaaacagcgccgaaacttttggaagaccttgagaactataagcaccgcgaaacgattttatacgcgggtacgatcgcattaaacggcacgctgcaaatgggctatttcggcgattgggcttcccatacgatggagcacgccgtatcagcggtttatgacatccctcacgcgggaggacttgcgattctgttcccgaactggatgagatacacgcttgatacaaatgtggaccgttttaaaaacctcatgcttaatatgtttgacattgatactgaaggcaaaacggataaagaaattgcgcttgaagggatcgataaattgtccgcgttctggacaagcctcggcgcaccgtcccgccttgcggattatgacatcggcgaagacaagcttgagctgatcgcagacatcgccgcaaaagaaatggaatacggcggattcggcaatttccaaaaactgaacaaagatgatgtacttgccatcttaaaggcgtcactgtaagatacattcccggccggagtgattttcaagctgcagatgtaaccgttttgggagtccctctttccggattttctattagttcattaggagcaagtgaaacacccttttccatgagacaactatggaaatcgtttcatccgtaaaggaccaattaactttgcgattgtctgtcatctatttacacgaaatctaaatcacgaagatgaagagccgcgaatttaaaaaaggggcgctgattcaatcagcgctcctttttatgcattttgtgtactaaggtcccgctgcgcccccatatagcttcccattaagttttgataaccgggaagatgactggagactaatgcgccaaaaccttcaacatcgttgcgccaatcacgctgaagctcgcatgctgtgctgaaccagttcataagctgcacgccgccatgagccatacgggttaatgatgcatctgctacttgcttattaaacgtccccgaagcatctgtcacaacaaacacttcgtagcctgctttaatggcagaaagcgcaggaaaagcaacgcagacgtctgttaccacccccgcgataatcagctgttttttgccggtcgcttcaatggctttaacaaagtcttcattgtcccatgcattaatttgtccgggacgggctatttttggcgcatcaggaaagagatcaacgagttcttgcatgagcggtccgttgggtccattttcaaagctggttgttaaaataaccggtaaatcaaagaatttagccgtatcaccgagagccaatacattgtttttaaattcatcaacgccatagtcacgcacgagaccggaaataaggccggtttgatggtcaactaaaagcacggcagaatcatcttttgaaagacgggaataaagatcagacattttatcatcctccttgaattaaggcaagtcagtttgtcaatggaaaacggtaaatctattcatatactgtataggtagaaagttatttctgaagtgacttttcgtgaaggtgatgatctttcaattaatccggaatgggaaccggagcatgatcaatccaatggatgaactgttgtaaatagcgttgaagataacgttttgtttgttcatccgtaagtatgtgttgagcggaatcaattttctcatggacttgcgaaatcagcattttttgaaagggcagaacattgacttgcatagcttcgagtacttctctcgtttgcatttgaccaaaagaggtgccgaaccctccgggggttgcgccgattaagccaaccggttttctgtttaaaacggaagaggtccgcggtcacgatgcccagtccaatgcattttttaatacccccgggattccggaattgtactctggacttacaatgatgacgccgtcaacgtctcgtatatcagctctaaaggatgttacggagtctggtgctccggccatttctaaatcttcgttaaaaaaaggaagagtgtctatttcaacccagcgaaattgagccgcattatcgaagtcaatcaatgattgagcaatcactcgattatacgagttttttcgtaaacttccacaaataagaccaatggttttagtcaaagaatcacctcccggtttaaaattattttcatcttaacatgataacccaaatatagacactatttttaaaaatggacatttataccttaatatgcctgcttagcagcctctcaagaggagtactatataaaaagaaccgtcccatcggtattggcgatggatgtcaacctgctccaaagtaaaggtgatacgttcctggatcaccaacattcgattcgttacctctttcacgattattacaaatataactatttcgaatccgggatattgtataaaaaatgagcgcatcttcagcgcaaatcccgtattcatcatgccttcttcatgacttgatttagcgggtgagttcatataaagtgaaagagaaaacaattcaccgtgatggagggacaagcaaatgacgcatgtacgctttgattactcaagagcgttaccttttttcaatgaacatgaacttacatacgcacgtgatttcgtaaaaacggcacaccataatatccatgaaaaaacaggcgccggaagcgactttttaggctgggtggacctccctgaaaactatgataaagaagaattcgcgcgcattaaaaaaagcgctgaaaaaatcaaatcagattctgacgtgcttctcgtcgtgggtatcggcggttcatacttaggcgcccgcgcggcgattgaagcgctcaatcattctttctataatgttctgccgaaagataagcgcaaaaaccctcaagttatctttatcggcaataatatcagctcaacttatatgaaagatgttatggatcttttggaagacgctgatttctctatcaatgtcatttctaagtcaggcacgacgacggaacctgcaatcgctttccggattttccgcaaacttcttgaagaaaaatacggaaaagaagaagcgaaagcgcggatttacgcgacaacagataaagaacgcggcgctttaaaaacgctttctaatgaagaaggcttcgaatcattcgttattcctgatgatgtcggcggacgtttctccgttctgactgcggtaggccttctgccgattgcggtaagcggggctgatatcgatgaaatgatgaaaggcgctcttgatgcaagcaaagacttttccagctcggaattagaagagaacgcggcttaccaatacgccgtcgtccgcaacgttctgtataataaaggcagaaccattgaaatgctcatcaactatgagcctgcgctgcaatactttgctgaatggtggaagcagctcttcggcgaaagtgaaggaaaagacgaaaaaggcatctatccttcttccgctaacttctcaacagaccttcactctctcggtcaatacgtgcaggaaggcagacgtgatctgtttgaaaccgtattaaacgttgaaaaaccgaagcatgagctgacaattgaagaagcggaaaatgatctcgacggcttaaattatttagccggcaaaacggtcgatttcgtcaacaaaaaagcgttcgaaggcacgatgcttgcccatacagacggaaaagtgcctaacttaattgtcaatattccggagcttaacgcatatacatttggatatctcgtttatttctttgaaaaagcggtggcgatgagcggttatctgctcggagtcaacccgtttgatcagccgggtgttgaagcctataaggtgaatatgttcgcgcttctcggcaaaccgggctttgaagagaaaaaagcagagcttgaaaaacgccttgaaaaataaaaagaagggctggccctcagcatgacgggtcagccttttttaaaccgtgaaaggtgtgatgatgaattgatgcggcttttatgtaagcatgtcttcatttccgtctgttccgccgctatcgtctattcggcactaaaactgtctcccgaatccctcttgcaaaccatcctgtttttcgctttccctctcggcttgtttacggacatggtccggctgaaactgaagattggccggatgcatacgctgatcacgaagtgctgtctctatgccgccgttttctatatttcaacggaagccgctctctccgcaattgtgacgtatgttctgattgaatgcgccgtcacctcttttcagcgtctgtctgccgctcccggttcttcccggacgccgtatgaagataccgcagagcggggacgctaaagacaaaaaggagcatatgcacatgatcagcataccatcttcacttgaaggtcaatcgtttttactccgcgaactggaacaggtgatgaaaccgatcggttataccatcggaggcggctgggagtatgaccgcgggttctttgattacaaaatttccgatcaggacggctatttatttctccgtatccctgttgaagcaaataagggacacctggatgaacggggggccgccgttacaatcggcacaccctttttgctgaggcacgtttatcagcaggaaacggatgatgcagcaggcggcggtgtttttgagtcattattcaaccaattctccgaaccgaaacggcgggatgcggcaattgaccgctcatatacagatatcggcatctcgcttgtgaaagagctggaagacgtcctgctgcattaaagagccaaaaacagatcagtatcgagcacctggtatgacaggggaggggtcagcatcggcccctcttctttttgtatgccgatgatcgtggtattccgtctgagataatagagcgcgcagtcatgataagatgagccctttagttcctcggggacgggaatgatgcgcacctttttctccagcgtcagatctgacagcgtttgcggtttggcaagctgcagcttgacccggtaatgctcaaacatcacccggctcgacaggtgtgatgtgcacagaatcttattggctcctgcgcgctcggcgtttttgacataccgttccgttaaaatttctacgatacaataaacagacggatgcagccctttgatggcgagaagcgttaataccgacagcatatcagcttcggattcatttttctgctggtccgctgtcagaatgacggtatcagcttccgtaatattcgccttattgagcgtgctgtcatcagcggcatgtccgcggatgaaatggacgttttcaataagcggaccttcccttaatgaatcatcaatcaggacgacagtttttgacggtgcgatgtgctgcagctctttcagcagcatatgcgatttttcgttccatccgataagaatgacgtgccccttgcctttaaaggcgaccttcccttcgacatagcggtgctgtttgctgaacacggctgaagaaagcgtggcgaaataggcggtcacaaaactcgctccgcttaatacaagcaccatgccggcaatctgcccgagcggcgtctgcggaacgtaatcgccgtagccgactgtggccaccgtaatgaccgcccaccaaaccccttcaaacacagacgtgaattgcttcggttcgagcatgtaaatgagttggccgaacaataaaatcaaggcgataatgatcagcccgatccgaacatataacggccatctcagccaggaaataaaaatacggtttgatttcattcgtccggctcttctttcgacagagagatggataaaatctgcttaataatggtgtttagtttttcgtccagctgttcctggccgtatgagtcacgcgcatgtctgattaaatcggccgtctcatcttcaaactgaatgagaggttcgtcgttttctgattcattatagagctggatgaaggcgtcaagcccttcgttcattctgtctatcgcattgctcagctgttctttctcgccatttgtcactttcatgtcgatcacacctgtatctttttttatacagtatgtcccagttcgtttgatgtctttcaaaaatcgccgaaaacatattcacccttattttttcatatgataaagaaagcggaccgaaaaagggtgagtcaaatgacggtcattcaaaaactgttggcggcgctggccggagcgcagctgcttgcttcggcggccgtattgcttattttcgatttgaatggatacaatcacatgtccggcggattttcatggcttgtttttgcaaaagagaccgcaggcacgtttccgttttacatcggaatggccgggtgtatcctcatcatgctcggaggattgattcctgtcagaaaaaagaagcggatttctgtacaggaaagcgggcaatcattaaaataatatataagcagatcgtacgatataagagaaaaaggaagaggataatatgctgtttatctttttaacaattgctgcattgggtttgtcgttttgggcacaatttaaagtgaaaagcaattttcagaaatactcagacgtggaagcctccagtcagcggacgggggcggaaacggcaagacggattcttgatattaacggtttatatgatgtgccggtagaaccggtaagaggcactttaacagaccattacgacccgacggagcgggtggtgcgtttatctgagccggtatattacggccgctccatttccgccatttccgtcgcttcccatgaagtcggacatgctttgcagcatcaggaatcatacggcgcgcttgtgctgaggcacaaaatttttccggtcgtcaattttgcctccggggtcgcccctctgcttttcttgggcgggatgctcctgggcagcttgaacttaatcggactcggcattattttgttttcggccgctgtttttttccagcttgtcacactgcctgtcgagtttaatgccagcgcgagggcgaagcggattatcgtgtcggaaggattcattcgcaacagtgaagaacacggcgtgaataaagtgctgaacgccgccgcgctgacgtatgtggctgcggcgctcgtttcattattcgagctgcttcgttttgtgatgattttcttaaatggtcgtgatgagaattaacacgaaggaggtggccccttaccgtttgcggtaggggtttttttgcttatattaaaactgattctcattatgctgttaatcggattaacggccatctttgtcgctgcggaatttgcgattgtcaaaatccgcggttcaaaaatcgcggagctggttgaaaccggagacagccgggcgctcgcggcgcacagggtgatttcaaatctcgatgaatatttatcagcgtgccagctcggcattacgattacggcgctcggactcggctggctcggtgaaccgacgattcagcggcttcttcatcctgttttcagcctgatcggaatgccgtcatctattacgcacgtcgtcacgtttattgcggcgtttatcgccgtcacgtatctgcacgtcgtcatcggagagcttgcgccgaaaacgatatccattcaaaaagccgaagctgtcagtctgtggacggcgaaaccgctcattctgttttataaagtgatgtatccgtttattaagctgttaaacggctcagccggatttttggtcaagctgttcggttttcattcggtgaaagaacatgaggtcgtggtcagtgaagaagaattgcggctgattttgtccgaaagctataaaaaaggtcaaatcaatcaatctgaattccgttacgtcaataaaatatttgaattcgataaccgggtcgccagagaaatcatggtgccgcgcaccgaaatcgccgtcatctcgcttgaacagtcagttgatgaagccatacatttgatcatcaacgaacggtatacgcgatatccggttattaaggaagacaaagatcacattctcggcattattaacaataaggatttatttaaagcgtattttctcggccgctccattgaattaaaagaaatgatgcgtccggtcatcagagtcattgaaagcatccccgttcaggagcttttgatccgcatgcagaaggagcggattcatatggcgattctcgttgacgaatacggcggcacggcgggacttgtgaccgtcgaagacatattggaggaaatcgtcggggaaatccgtgatgaatatgaccaggatgaaatgccccacatcgtcaaaaaaggcgaacaccattatgtgatggacggcaaggcgctcatagaagaggtgaatgatctccttgatatcgccatcgaaaatgaagacattgacacgattgccggctggctcttaacacaaaaaatggagctgaaaaatggtgatgtgtttcatgccgaagggtgtgaatttaaggtgctggaagcggaagaccatcatatccgcttcgttgagattaaaaaaactgatttctgagcctcctgcttttgcaatgaggctttttttatggaaaaaatgcttcttcgtcccgctccttcatatgctgtaaagaaaggagtgtcggtatgaaaacggattggtggaaaacggcggccgtctatcaaatttatccccgaagctttatggattcgaacggggacggaatcggcgatattaacggcatcagagcaaagcttcattacataaaagagttgggggcggatgtgatctggctttgtcccgtttttgactcgccgggcgcggacaacggctacgatattcggaattataaacaaattgccggcgaattcgggacgatgaaggattttgaccggctccttgcggatgtccatgcgctcggcatgaagctgattatagacctcgtcattaaccatacaagcgatgagcacccttggtttatcgaatcacgctcagcgaaagattccgaaaaacgggactggtacatctggagagacggaaaaaacggcaaagagccgaataattgggaaagcattttcggcggatcggcgtgggaatatgatcaagagaccggccagtattacctgcacctgtttgacaaaaaacagcctgatttaaattgggaaaacgaagcgatgaggcagtccgtttatgagatggttcgctggtggcttgataaaggcatagacggcttccgggtggatgccatttctcacattaagaaaaaagaagggctccctgacatgccgaacccggacggtctcccgtacgtcccgtctttcccgtatcatatgaatggggaaggcataatggatctcttaaaagagctgaagcgggaaacattttcgcgctatccgatcatgacggtcggcgaggcgaacggagtggcggcttgggaggcggctgattgggccggtgaagaaaacggcgtctttcaaatgatttttcaatttgaacatctcggcctctgggatacggaagatgatcaaagcatctccattccggcgcttaagcgcgtcttgtccggctggcagtacagccttgaaggaaagggctggaatgcgttatttatggaaaatcacgaccagccccgttccgtttcggtatggggtgacgaacggtttttgacagaaagcgccaaggcactcgccgtgatgtatatgctgatgaaaggcacgccgtttatttaccagggacaggagctcggcatgaccaatgtttcgttcccatccattgaagattatgatgacgccgcaattaaatatctgtatgaaaaagagacgtcccgcggcgttccgcatgaacaagtgatgaagatcatctggaagaagggccgggataattcacggacaccgatgcaatggagcggtgaggcgaacggcgggttttctgatgcttctccgtggctcggagtgaatccgaaccacacatggctgaacgctgcatcacaattgcaggatgaaacatccgtataccatttctacaaacggctgctcgccctcagaaaaaaacacggcgtattgatcagcggcacatatgaattgctgcttccgaatgaccggcagatttatgcctatctaagaaaaaacggaacaaaaaccgccctgatcatcaccaatctgtcccgaacccccgctttatacaggcatcccggttatccgcttgactccgattctctcgtgcttgcaaacgtggaaacagaatcgcaccgccatgtgacatccttcctcttaaagccttatgaggcccgcgtatatatatggtgaaaaacttcagtcccgaggctgaagttttttgtgatctgtgtttatcatcgcgatccgacaggaaaagacaaatacagaaacgaatatgggaaaggaagagaaaaagaaaggaggcattcatatgctgaaaaaattgcagattcaaacaaacaaaagggatgaaatgatcgacatcacacatgaagccgaatcgtttctccgcgaaacaggcgtaagaaacggtttggcgctcatatactgtccccataccaccgccggcattaccatcaatgaaaatgccgacccggatgtgaagagggatatgctcagaaggtttgatgaaatgtatccgtgggagcacgaactggaccggcatatggagggaaatacggcggcacatatgaaagcgagtacaaccggcgcctctcagcatgtcatcatagaagacgggcgcctgatactcggaacatggcagggcgtttatttttgcgaatttgacggtccgcgaaacagaacatgttatatcaaaatactggctgaaacggaggaaaacaaatgagtgagtggatgagtccgttatcattaacaaagcccgtcattcaggccccgatggccggcggactggtcacgccgcgtctggcttcggcggtatcaaatgaaggggcgctcggaagcctcgcttcaggatacgtcagcccgcaagcgcttgaaaaacagcttatcgagatgaaagagctgacggaccgctcctttcaagtaaatcttttcgtcccggaagaaagacagatgcctgaggcggaacttgttgaaaaatggaaagcccgcattccgagggcaaaagacgccaagccgttctctgatctgaaagaagaatggaatgatttcgcggaaaaagcggagcttctgatccgttacggagtcaaagcgtgttcattcaccttcggcctgccgccggaaaaaacggcggaaaagctgaagaaaagcggttgtttccttttcggcacggcgacaacgccggaggaagcgaaggcttttgaagaacggggaatggacgccgttatccttcagggaatagaagccggcgggcatcgcgggtcgtttctgccggttaaaggagaaccggctctcggccttatggcgctgattccgcaggctaaagacacgctgaatatcccggtgattgcggcaggcggcatttttgaccgccgcggggtgcaggcggcccgatgtttgggtgcggacggcgttcaagtaggaacaccgtttctcctttgtgaagaaagcagcgcctcaccggcatatcaaaaagccattgccgaatcaaaaggagccgatacgcggctgaccaccctgttttcaggaaaacaggcgcggggaatcgtgaatcagttcatgaaaacatatgaagctgacgagggaaaaacgctgccttatccgctgcataatacgctgacaaagccgatgcgcgggcacgcggctcaatcaggagacgcggagcatatgtctttatgggccggccagtccgccgcgaaacttgaggggccgacagacgtgaaaaccgttttggacagattgtgcgaatcataatccagaaatcgtgaggtgatggatgatgaagattcttcaaatgtcctataaaaaaagagggactattgagtttgtctttgaagattttccgcattccaaagtcaccatggcgccgattaaagggtattactttgtccgcgccattaaatggagcagacgggacagagccgtcacccgccatgatttagagaagtttgaatgggctgcaaaccaagcgctcggcacgacggctttttaccggaaaagaaaagcatttcacatcccatcgtcacaatgacagacgatgggattgttttaatgcatgatctgataaagcgcgggtgcatcaagccttgttgcctggttaagcagataagccggctgcacggcatttttttttcttaaagaattcaatctctggatgatttgttcagcggtcagaatcccgagaccgtgggcgaaatattgatcattccccatcacaatgacattttctccccgccactgagcctttgcagggttaaaatcaggatttttaaaatataaacagtctccccgtaaaaagtggctgccggtttccgtgtagatcggcagatgctcatagtgccagtcatacaaagtgatatcccggaaacgccggttaaaccgttcttcaccgattgtctttaagacggccagataataaatcacaacaatggcggtagcgcattcaaatgcgtaaaacgccccgttttcaataatatcccgaatcgcttttgaagcgggaatcctgtacttcagctccagggctccttccggcgtcagtctccaataagccgtatttccgtatgttttggcgaaagttgcaaatttcacacctgatccgtgcagttctcttgcggcttccacaatatggcggcgcagccgcacctcgaacatcagttcagcaatcgacccgtaatcgaattgtacgggagaattgagcagttcatttatatacggaacaaggctttcttccgtctgccagttcgcgatgtcctgaggccgaagcacttggccggatatgataatcatctgcgcgccccctatctttttttataagatatgcaggaagcttgggcaatgaaaatcaagtgataaaaaaggaggaaatgttaacaaaatgtgaagactgagccgatatataaggtatcacacttgagggagcagcttaatatgaaaaaattcattaattggtgcacaaaggcatcgatttcacggaaattaatcatttcatttatcgtgatcttaatcataccgattctcgtgttagaattcagttcataccatacggcgagcaattcgctggatgatcagatttcaggcaacgcgaaaaataacatcgaatcttttaacacaacgattacaaatgatatcggcgcaaaagcaaaggcgattgaatttttcagtgaaacgttaaaaggatcatccttctcaaagaaaaacatgtctgctcttgaagaaaagttcgggcaatacacgtctattcataaggacgtagcccgcatttacggaggaacggaagacggcagctacgcacaggcgccgaaggaaaatactccggccgattacgatccgagaacacgcacttggtataaagacgctgtgaaggccggcggcacgctcgttgtcaccgacccttacaccgcggcaagcgacggcagcatggtcattaccgtggcaaagcagatgcaggacggaacaggcgtagtggccatggatattacgattgaccagctgctgaagcagatgcagggaatcaaaatcgggcaaaaaggattcgtgtttatcacgtccaaaaataaaacctatgtcgcgcataaagaccacaaaccgggcgataaagtttcaacgccgtggctgaatgaggtatacagcaaagacagcggcattatttcatacaagctcgatgatcaaaataaaaaaatggcgtttacgacaaataaactgaccgggtggaaaatagaggggagcatggagctcaacgaaattaaagatgcctcacaaccggtgctgacgatggggatgattgtccttgcagcatctattatcatcgggggaattttaattctgttgattgtcagatccattacgtcaccgctgaaacggcttgtccgctcttctaaacaaatcagcggcggagacttgactgaaaccattgacatccgctcgaaagatgaattgggcgaactcggcgcgagctttaatgaaatgggagaatctttgcgcggactgatcagcgcgatccaaaactctgtcgataacgtggccgcgtcatcggaagagctgaccgcttcagcttctcagacaagcaaagcgacggaacatattacaatggcgattgagcagttttcaaacgggaacgaagagcaaagcgaaaaagtcgattcaagctcagccaagctgaatcatataaatgacggactcgccgccgtttcccgcacatcatcatccattacggaggcatctaaacaatcgaaggaagctgccggcaccggggaagaatatgtgcagcaaaccgtcgggcagatgaatctcatcaatcaatcggtccagcaggcggaagcggttgtaaaaggccttgaggccaaatcaaaagacattactcatattttaagagtcatcaacggtattgccgatcagacaaacctgcttgcattaaatgcagccattgaagcggcaagagccggtgaatacgggcggggcttctcagtagtagccgaagaagtgagaaagcttgccgtccaatccgccggttctgccaaagagattgaaaaactcattcaggaaatcacggctgaaattaatacttcgcttcacatgtttacatccgttaatgaagaagtgcaatcaggacttgccgtaacggatcgcacgaaagaaagcttccagaatatcttcggcatgacgaacgacatcgccgaaaaactgcaatcaatgaacggcacggttgaacagctgtcagacagctctcagcacgtttcagccgcagtgaccgatattgcggacgtatcacgggaaagcgcagcaagcattcaggatattgccgcatccgcagaagaacagcttgcatcaatggaagaaatcagcacatccgccgatactttggcgcaaatggccgaagaactgcgggaattaacgaaacaatttaaaatcaactagtaaaaaaggacgctttccaggtggaaggcgtccttttttatagtgacagccggataattaaataaaaagtcttgcatacaaagggagtacatagaactatttttcatttatgacttaattttcaatgtaataaaaagggagtcggccgatataaacagtaaatgattgaaagaggtttacaaaattgaaaaaaacagcaaaaaaaatcgccagaaaatcaatagccaaaaaacttatcatttcatttttactgatcttaattattccggtagcagtattggccgccggcgcctaccgttcggcggcttcatccgttgaaaagcaaatgatggaaagcgccgaaggaaatgtgcaaatcttaaacaatatgattgatgaccggatcggaatgtttacaaaaagctctgcatatttcagcgaatgggcgacaagcgctaaatttaaagaaaaaaaccaaacggaaatgcaagaaaggtttaaacagtttattgaaagcaatgataaagcgtccgccatattttcaagcagcaaggaaggaacgtttacccgttatccgcatgccgatatgccggccgatttcaatccgcttgaaagaagctggtatcaggaagccatggagaataaaggccaaaccatcatcacggacccttatgagtccatctcaaacaaaaagatggtcgtcaccatggcccgcgcggcgcaagacggatcaggcgtcgtcgccattgatataaaaatcgacgatctcatcacgatgacaaaagaagtgaacatcggaaaagaaggatacgcctttatcctcagcaaaaataaaaaagccgttgcctacagtgatgaaaaagccggcgcggcggtatcgggaaaatgggttgatacattatacagcgggcaaaaaggcgactatgaatatacgctgaacgggaaagcgaaaaaaatggcgtacgtgaccaatgaagcgacgggctggaagatcagcggaaccatgtccgtggatgaaatcaaggatgcggcaagaccggttctgactctggccgttatcatattggcgatagccgttgccgcagggatgattttcatttattttgtcatccgctcaattaccaaaccgttaaaacgtctcgtagcttcagcggaaaaaatcagcagcggagatctgactgaaaccattgatgtcagctctcaagatgagctcggcgtgctcggtaaaagttttaatcatatgacagattcactccgttcgcttattcagggaattcaggactctgttgaacatgtcgcttcttcctcagaggagctgacggcttcggctgagcagacgagcaaagcaacggaacatatcacccttgcgattgaacagttttctaatggaacggaagaccaaagtgagagtattgataaagcgacagcacaagtgaatgagatgaaagacgggctcagcgatctggcggaagcggcagccgttgtgacggaaacttcaattgaatcggcggagatatccggcgccggtgagcggcttgtcaagaaaacagccggccagatgggcgccattgaccaatccgtaagtaaagcggagcaagtcgtacaagggcttgaactcaaatcgcaggacatcaccagcattttgcgcgtcattaacggcattgccgatcaaacgaatctccttgctttaaatgcagccattgaagcggcaagagcgggagaatacggacgcggtttttcagttgttgccgaagaagtgagaaagcttgccgtccaatccgccgattcagcgaaagaaatcgaatccttaattcatgaaatcgtcaaagaaattcatacttcgctcggaatgctggaatccgtcaatcacgaggtgaaaagcggacttcagttaacggacgaaacggaaaaaagcttccgggacatttccgctaaaacaagtcagattgccggtgaactgcaaaatatgaatgcaaccgtggaacagctttctgccggatctcaggaagtatcaaacgcttcagaggatatcgcggcagtctccagacaaagcgcggccggcattcaggacatcgcggcttcagctgaagagcagcttgcgtccatggaggagatcagttcctcagccgtcacgctggaaaaaatggcggaagaattacgcgaactgacaaagcgttttaagataaactcttaattaagtctaaaagactaattttgcaataggtaaaaagtatgtttcgttatatttcttctttttggatgtgtatatttacccataattgccgatatgaagggtaaacacgcaagaggagatatagcagatgaaaaaaattgtgcaaatcatcaagcagagatcgcttacaagaaaactgctcatttcttttttggccattctcattcttcctatttcaacgctggcttttatcgcctatcaatcggcggtaagtacgcttgacaggcagatgatgggaagcgcattagataatgtgcagcagattaacgatatgatcaacacaagcatcagccaaaaggaagacggaacggcatatttcagcgactggctcacaaaggatcggtacaagccgaaaaaccaatcgcaaattaccgataaattcacagagtacatgaagattaataaagacgtggaatccatctatacgagtgacacggaaggacatttcacacggtatccggatctgcagatgcctaaaggatataatccgcttgaaagagactggtataaaaaggccgtggaaaataaggggaaagttgttgtaacagatccttaccgcacggcttccaccaatacgatggtcgtgacggtcgttcagcagacgaaagacggctcaggggtcgtcgccatcaatatgaaaatcgatgagcttctgaaaacgacaaagaaagtgaacatcggaaaatcaggctacgcttttatcctgacgaaagacaaaaaagtggtcgcccacccgaaccgtgcgtcaggcacagtattaaacggggagtgggctgaacagttgttcaccagcaaaaaaggtgattttcaatacaaatacgacggccaggaaaagaaaatggcttatgatacgaacgggctgacaggctggaagattaccggaacgatgtatctggacgaaattcatgaagcggccctgccgatccttcatctgtccctgctcgttctcgtattagcgattgtcatcggaaccatcgtcatggtgctgattatccgttcaatcacaaaaccgctcaagcagcttgtgacatcatcgaaacagatcagtgaaggcgacttaacagaaacgatcgaaattcagtcaaaagatgaattaggcgagctgggcaaaagctttaacaatatggccgcttcactcaggtctctcatccatgccattcaggattccgtgaataacgtcgcatcttcctcagaagagctgacggcttcagcggagcagacaagcaaggcaacggaacatatcacactggcgatcgaacaattttctaacggaaatgaaagccaaagtgaaaatatcgaaagcgcggcggaacatatttatcaaatgaacagcgggcttaaagatatggcgaaagcatctgccgtcattaccgaatcctccgccacatcagcggaagtcgccaattcaggcggaaagctcgtccaccagacggtcggccaaatgaacgtcattgaccggtcagtgaaagaagctgaacaagtggtgcgcggacttgaaacaaaatcaaaagacattacaaacattctcggtgtcattaacggaatcgctgatcagacaaaccttcttgcgctgaacgcggcaattgaagccgcgcgtgcgggtgaatacggccggggcttctcagtcgtcgccgaagaggtcagaaaacttgcggtccagtctgccgattcagcgaaagaaatcgaaagcttaattatagaaatcgtcaacgaaatcaatacatctctcggcatgttccaatccgtcaacaaagaggtggagagcggactggatattacgaatcagaccgaaacgagcttcaaacggatttctgaaatgacgaaccagatcgccggagaaattcaaaatatgaatgcgacggtagaacagctgacagcaggatcacagcagatttcaggagcttctgagcaaatcgcgtccatcgcaaaagaaagctccgccagcattcaggatatcgcggcctctgccgaagaacagctggcttcaatggaagaaatcagttcgtcttcggaaacgttatcccaaatggcggaagaattacgtgatatgacgaaacgatttaaaatagattaatagatcatagaacacccaaatgtgctgtttgggtgttttttttagtttttttaataaatcttttgtcctatctgacgatattagatttagcttttcaaagaaggagactgaaaaaatgaaacaactgatacattggatcaaacagccatccatcagcaagccgctgatcgcggcatttttagccgtattggtgcttccggtcggcatactcgcctacttcagctaccaaacggcggggagtacattagaaagcgaactgacccacagcgcccagggaaatgtcagtgaactgaacagcgtgctggaaaacatgcttgagggtaagctgaaagcgattgactactacagcgaatcaatcacaaaggaaaaactgaacacgaaaaataaatcggtactgctcgacaatatgaagcagtatgtcaccgtaaatggcgatgtcgcgtcaatttacgccgcgtctcgcgacaaagcgtttgtgaaatatccgtccgctgacatgccgtccgattataatccgctcacgcgcgagtggtatacaaaggcggttgaaaaaagcggacagccggtgtttaccgagccttataaagacgctgcaaccggacagacggtcgttacgattgcccagcagacaaaagacggatcaggcgttgtggcgcttgatattaatctgggcgacctgctgaacgcttccgaacgcgtccagatcggtcataaaggatttgccttcattacaacgggggataaaaaatacatcgcccatccgactataaaagcgggaacggaaggctccggagagtggacgaaagaagtattttccaaatcaagcggatcgtttgaatacatgtttgaaggacagcagaagaaaatggctttcacgacaaacaaactgacgggctggaaaatcgccggcacattttttgtcagtgagatccatgacgcagcctcgcctgtcatgaaaatggcgctgatcatcctggcggtttctcttatcgtcggcggtattttaatcttctttatcattcgctcgattgcaaaaccgctcaaaaaacttgtctcgacatcagataaaatcagtgacggcgatttaacggaagtcattgacatcaagtcaaaaaatgaattcgggcagctcagccaaagcttcaatgagatgtcggcatcactccggtctgtcatcggcgtcatccaatcatccgtcgaacatgtcgcttcttcatccgaagagctgacggcatccgccggacagacaagcaaggcgacagagcatattactctggcgattgaacaattctcaaacggaaacgaatcacaaagcgagaaattggaagaaagtgctgatcacctttcccaaatgaatgcgggcattgccgagacggcgaatgtatcggcggaaatcactgaatccgccatccaaacctctgaaacggccggaagcggagaagaattagtggcgaaaacggtcggccagatgaaaacaattgatcgttccgtacagcaggcggaagccgtcgtaaaagggctggaaacgaagtcgcacgacattaagagcattctgaacgttattaacggcattgccgatcaaacaaatctgcttgccttaaacgcggccattgaagcggcaagagcaggcgaatacgggcggggcttctccgtcgttgcggaagaagtgaggaagcttgccgtacaatcagccggctccgcaaaggaaatcgaaacgctgattcaggaaatcgtcaaagaaatcgccacatcgctttccgtattccaagcggtgaatcaagatgtgaaggaaggcctcgatattacggatcaaacggccgaaagcttcaaaaaaatctcagagatgacgactcagatttcaggcgccttgcagcatatgaacggaacgcttgagcagcttgcagccgggtcgcaaaatgtgacaaacgcggtggaggacattacctcagtcgccaaagaagggtccgccggcattcaagacatcgccgcctcagctgaagagcagctggcctccatggaagaaatcagttcatccgccgaaacgcttgcgcatatggctgaagaactgcaacaggtcacacggaaatttacgattcagtctgaagacgaagaacagctgtaacgagctgtttcttttcctcatctgaaaaaagcgatacactaatataaaagaagggagtggcagtgatgagattagaaggcaaaaaagttatagcgcttgtcagtgacgattttgaagacttagagctttggtatcccgtctatcggctgagagaggaaggcgcgatcgttcatttaataggagaagaagcgggccgttcatacaaaggaaaatacggcgtgcccgcgacggcggattacgattttaagagcctgattattcaggagtatgatgccgtgctcgtgcctggcggctgggctcctgacaaactgcgaagatatcccgaagttttggacatcatccgtacgatgaacgagcagaaaaagccgatcggccagatctgccatgcgggctgggtgcttatatctgccggaattctcgcaggaaaaaaagtaacgagcacgcccggcatcaaagacgacatgacaaatgcaggggcaaagtggctggatgaagctgtcgtaactgacggccacattgtatcaagccgccgcccgcccgaccttccgcagtatgcaaaagcgtttgctgacctgttagcgtccaaataaaaaacatccgcccgaatccgggcggatgtttttagttttgatcggcgggaaagacgattccgatttgttttctcgcttcttccataatgtttgccgtaatgaaagaacgttcaaatgtattttcggaagactcccgctgtccgtttcgaagaagattgatgaattcagccgtttcgtagtacatcgaaggtttcagatcagggactgaaatgtcttccgtccggccgtcacgatagcggatttccgcccgttccggtccgtgaatgctgtccagaacgatcgtgccttcttcaccctgaatttccgccggggcaaacgaatttgagattttcgaatgcatcagcaccgcttcaaatccgtcgtatgacagaatgaccgtgccttcgccgtcaacgccggatgctagtttatgaccggtcgcaatgacgtttttcggtttgccgaacaggacgacggccggataaatgcagtacacgccgatgtccattaacgaaccgttcgataattcaggcttaaacgcgttaagcaccgtaccgtttttatatgcatcatatcgtgatgaatattggcagtagcttgccgtgaatctcctgacgggtccgattttatgtaagtggttttgaagcatgctgaagttcggcaggaacgtcgttttcatggcttccatcaagagaacgccgttcgttttggctgcgtgaatcatttcatccgtttcccttgcgttagacgcaaacggtttttcgcatagtacatgcttgccgtgttccataaaaaggaccgcctgctctttgtgaaatgcattcgggctggcgagatacaccgcgtcataggctttgctttccgccatttctttcaggctggtgaaataatgagcagcgccgtgtttgccggcgaattccgccgcacgttcctcagttctggaataaaccgccgttaattgaaaatcatcaatagcagaagccgcctccagaaatcgttctgtaatccaattcgttccgactgttgcaaatcgaatcattgctatcgctccttctatgtattggcttacattatagctttttttcaaagaaacataaatggaaaaaaggctgccagctaaacggataggaaaaattcccatagagaccggttattatttttcattacaggaacgatagtgtacaatttaagtaaaatacatatgatggaggaacaatagtggaaacattgcaaacatggggcggcagatttaaacagtttttcttagacaataaatttgtcttgtttttgcttgtattgctgctcatcggtctcaatatccttgtctttatgaagacatcatttattttcacacccattatcgtcctgctcaaaacgattgcgctccccgtcattttgacaggaattgtttattatctgcttaatccgatcgtagatatattggaaaaaataagagtgaaaagagtctattccatcctgctcctttacctcattattatagggctgatttcgattacggtcgtttcaattattccgtttttaaaggaacagatcatgagcctgatcgacaacctgccgaaatatgtggacatcgttgaagatcagacgaaaagcctgatcggaagcgattttgtaaatcaggcgcaaaagacgatgaatatcaacatttcggatcttgccaataaagtatcggcgcaggcggcgacaattgcaaacagcacatttaccggagtcgggaattttatcggcgcgctgactgaagtgattatttcaattgtgaccgtgccgtttattctgttctatttgctgaaagacggcaaaaaactgccgatctatatcttaaagtttgtgcccacccgtctgaaagaacaaacgtatacgatgctgagtgaaatgaaccacagattaagctcctatatcagaggacaggtcatcgtcagcttctgcatcgggtttttattatttatcggctatctgattatcggacttgattatgcgtcactgcttgcggtcattgccgcttgtacgagcgttgttccgtatttagggccgaccattgctatcacgccggcgattattatcgcgttggtcacttcgccctttatgctgctgaagcttgcgattgtctggaccgttgtccagctcgtggaagggaaattaatttcgccgcagatcatggggaaaaatcttcacattcacccgattaccatcatctttgttcttttaaccgccggaaagctgttcggggttgtcggcattattttagccatcccggggtatgcggtcatcaaagtggtcacgacccatctgtttgattggttcaaaatgcgttcgcatttatatgaagaagaaaaaaatgatgctgtatcgaagtcataaaatcggaacggacatgatatttattataagacaggctttccttcaaaggagagcttctcttttgtaaatgatgaatgaagggaagaatgggatgacactatgggagatgttcacagcagccgttttgggaatcgtggaagggctgacggagtacgcgccggtttcttccacgggacatatgatcatagcggatgacatctggctgaaatccggaagcctgatgaatccggaagccgccaattccttcaaagtggtgattcagctcggttcgattctggcggtggccattgtgtttaaggatcggatattacatttactcggcctcaaaaaaaacgtcacgcgcgatcagcagaagggatacaggctgaccatcgcgcaaatcgccgtcggtcttgttccagcggcggtgctcggctttttatttgaggatttcattgaccgctatttattctccgtcagaacggtcgcttacggattaattgccggagccgtgcttatgcttatagcggactggatcaataaaaggaaagaaacgatcgatacggtggacagaatcacctacaaacaggctttctgtgtcggattattccagtgtctcgccttatggcccggattttcccgatcaggctcaacgattgccggaggtgttattgtgggcttgaatcaccgggcagccgcagacttcacatttattatggcgattccgattatggcgggcgcaagccttctgaagctggtgaaatactggagcagtctttcttatgacatgattccgttttttcttgtcggctttatctgcgcctttgtcgtcgccctcttagtcgtcaagttttttcttcggctcattaaccggattaagcttgtcccgttcgccatttaccgtgtcatcctcggcatcattttaatcatgctcgtgcgataaacgaagaggccccccggagggtcttctttttatgttcgaaaaacgtctcaggaaaatatgagcaaactgaattttctgcttgaaattcatagaagagtcgtctataataaaacatgacgttacagcacggggccatagctcagctgggagagcgctacgctggcagcgtagaggtcaggggttcgagcccccttggctccatacctttaaacccttattctataaataagggtttttttgttttttcatcctctgcagcagcctctgtgttccgcttcatttctaacaactcaaaataaaggaaagagagaaaatgaaaaagaaaatctatcttatattatctctgtcagctgcactggcacttcttttaacggcgctcccggctctttctcctgtcatcttcacgtctgcttcagaaaaaggagccatcaggcatgacatttataaaaaaggatatccgtatcaaagctactttgcgattcttcaaaaagaagaaggaggcggagaggacgggaacctttattatgtaaattggttcaattggaaagatgaaaccggacagacgccgcacgtatgttattcaaaaaaatcgtccgaaggcgagtacaaagtaagctgcggaaccggatcgtaatgatcaagagcccctctgcaatgaggggctctttctgtcgatgtggatccgcttaataccccctatagaacggctgaacataatgccgatacggatcattcggataatgcgtatttggctgataaggcttattcatatcatgaatacccgtgttttcagactgtccgcagtatttatcgggacctatcacagttgattgccggatcggtgaaacggctttttcccactcgtgctcattcagacagtacgtatgcgccatgatctcaggcggcgtcagacggagaatatccgagccatatatcacttcaggcgaaggggcgtcaaatatggccaaaaggtgggttttgtctgaagtggcgacttcataatgccaccacccctgcggaacattcgccacttgtcctggagagatcggataattccgtattttctgggtgaacggattcagcatcgacaccaccgcggaacccgaaatacagtacaccaattcagcggcgttttgatgggtatgcggttcaatcacatttgttttactcagaaagatatctaataatgaaatattttcaagcgtgtttaactgtttaatccccaatacattgataaagttccgagcatctttcgtaaaaaaacggctctcatttacatcataagtgaactgtgtattcggagacgtgtaatcgatatcggaaaccatgcaatcccccgctttcatctttaaacgtatattcccaaatatatgtgtccctgtttcaccgggtgataaaaaaggaggtaaaatccataaattccaaattcaacacaatattgtgacgacttttttaaagattcattttagatatatcttttattcgaaatatctcttactataaagatatattaaaaatacatctttagaagggttgaggatgaacatgctggatgagagaacagtagacatcatcaaaagcacagtacccgtattaaaaacacatggagaaaacatcaccggacgcttttataacctgatgtttcaagatcatcccgaactgttaaatatgtttaaccaaacgaaccaaaagaaacagactcagcgcgcagcattggcaaatgcagttattgcggctgcggcgaatattgatcaattagaacaaatcattccggcggtcagacagatcggccataaacacacaagtatcggtgtaaaaccggaacattatccgattgtcggaaagtatctgcttctggcgattaaggatgtgctgcaggatgccgcaactcctgaaattatgcaggcatgggaaaaagcttacggtgttattgcggaggcttttatcggcattgaaaaagacatgtacagtgaagccggatggcaggggtataaagaatttacggttatacagaaaacaaaagaaagcaaagatatcacatcattttatatcaaaccgagtgacggctcttcgcttcctggatttgaagcgggacaatatatcagcattaaagtgaggattgcggattctccttatacgcacattcgccagtacagcctgtctgatgcttctcgaaaaggcgcatatcggatatctgtgaaaaaggacggagcggtttcttctcatctccacaatgaagttcaagagggagataaacttgaagtcagtgcacccgccggggatttcaagctgtcttcttccgaaaaaccggttgttcttatcagtgccggttccggaatcacgccgatgatgagcatgctgaaaacagccgccgaaaaacagcccgagcgttccgttacttttattcatgccgcgaaaaacggagagtacgccgcgttccgcaaagaggctgaacaagctgcggagaatcatccgaatattaacgtcatttatgtatacagtgaaccggcagaacaagaccgctcaggagacaagcctttttacagcggccggattgatcaaaccttcttggagcagcttcatctgaatcaagatgctgaatgttacttgtgcggatcagcacagtttatgacgcaaatgaaagatatgattcttgcactcgggtttgactctgattccgttcaatttgaattgttcggccctcagctgagcatggcataacaaaaaaagactcctcattgaggagtcttttttatttgcacgatgtgttctttctccgtctttttccctattttattgaaattttcatcaatgaccagtaaaattataaatctagtgattccggaattaaaggaaggttgatatgaaaaagaaagcaaagaccaaaagggtgcttgggtgcctttttgctgtatctcttatattcggattatttctggtatcaatggtattttcgaaattcatagtgacggaagaaaaaccgcctgaagaggtggacgagcagcaggtctttattgacagcctttccgggcatgctcaaattttatatgagaaatatcatgtccttccgagcatcaccctcgcacaggccattctcgaatcggactgggggaacagtgagcttgcggggaaagcgcgcaacctgttcggtgtaaaaggtgattataaaggaaaacacgtcacgatgaaaacggatgaatttgaaaaaggaaaacgaaaaacgattcgggcaaaattccgtaaatacagcacgttttttgaatcaatggatgaccatgccaaattatttgtcaacggaacgtcttggaataaaaagaagtacaagcccgtcattgaagcggacaattataaaacagcggcggctgcccttcaaaaatccggctacgccacagaccccggctatgctgaaaaaattaaagatgtcatagaaacctataacctgaatgaatatgacaaaatcaatgcctctcttaaagcagttgataagaaaggcgccatcaaagaccacgccattgaagacgtgtggtccaagccgtcgaaagagcggcattctattaaactggcatcggcgcaaaagtttaccggccagcatattaaagtcgtatctgaaaaacaaaacggagaatccgtctggtaccaaattcaagtgaaagataagctggtcggctgggttgaccaaaccgccgtccagttaagtgaagaaacataagcatcaaaaaaagccggcagcttgccggctttttttacattccttcagtttcaaaccttttaatatcacgtttatgccccatcagcacaaggcagtcacattcatgaatgacagtctccggagaaggggacagctgaatgtctccattatgtttcacggcgagaatggtgcagccgaatctggcgcgtgcgccgagatcaagaagggattttaaatgcagctttttagtggctgaaagctccacaatgctgtattcatctgacaaatcgatgtaatttaagacgttttcatctgaaaggctttgcgcaatccgcacgcccatatccttttcaggatggataatacgatcagcaccgatcttttcaagcactttgtgatgataatagttttgcgctttcacccaaatattagggatgttcagctccttcaataacagcgtcgtcagcgtgcttgcctgtatattggctccgattgctacgatgacatattcaaaatttctgatgccgagcgactgaagctcgctttcttccgttgaatttgcccgcacggcatgcgtggcataagaggagtatgcgttgacccgctcttcgctgatatcgatcgcaagcacctcatgccccattttaaaaagctctttacagatgcttccgccgaaacggccgagtccgatgacggcaaattgtttatttttgatttttcccaatcctcataactccttaagaaactgttttcgtcactccaaatacaacaaacaagaatgtactcctgtttcaggggtttgtcaatgcgagggccggaagaaagaaaacagcacaaaaaaagaccggctgacaagcgatgagcttgtgccggtccgtttttcgcaattatttgcagttgcatggctgtgtcggcggtgtgctgcgtttttgaacaacaattgtgtcctcagcatagaatttagagccgatgcttaatgatttattttctgcacggaacttatatgtacctgcagcaggcaatgttttattattaagagaaagcttaaattccgctgcgccgagcaaatcaatgtttaacggaagtctgactgttttgccgttattcagaatctgtctttcgcgcaaagcgtgtccgttgactgtatcttttgttgtagccgcaaatccgctaggaagggtaaattccataacgcctaagctcaggatcgtgttcggacggtacgtcaattcgatatcagaaaatgaccattcctgctggctggcacctgtatattttgcaaataaggtagcagtcgctttcgtggacatttccggctcgtgaacggttgagcctgactcagcggcgaatgacgctgtcggcagagaaagaagcaaaaccaggccgaataaacttgccatgacagttgagaaaaacttgtgtttcatttttataaatccccctaaaaaaaatttgctgattgttcttaaaaaagaacgaccatacctataaaaatttaccatcaattttaatggaagtaaatggggttatgttcctatattttctcaaaaataatcaaatcacgacaaaaaacgcctgaatcaaaatcaggcgtttttttcgtccgtttctatcggaataaatttaaaaatctccccgctctgaaccgagtcggcgagccgcttcagccaatgataataagctttcgagctttcaagctgatcatataactgccgcgcttcttcctgtaattccgcgctgccttcctcggccagcaaaacggactgcaaatccgcctgagcctgtacgatggcggacaaattcacctgaacttcacggtcccatttcggcggaaagaaattcgtgaaaaacgtaaagaaatccttttccgctacaaacgtatgcttccgtgtgccgcggtgaaaggtttttttgaccacatttaaatcctgcagctttttaacgcccgtgctcatactcggtttgctcatctgcagttcctcacgcatttcgtcaagcgtcatttcatccctcatatacattgttccgtataaaatcccgacactccgggtgattccgtaaagatccatcgtctctgcaatggaatcaatgacaagatccctggcttgttctatagctgcgaattctggattctcatccatactgtccctcttttcctcttgaagtttaaatttgttaagtcatttctttatgttcttaatcttaacgaatcatgacaaaatgtcaaaatctaaacggactgaccgggttttgacaggcaaaaaaacatgtgttaaattaacattgttaaaaacattaaatttttatttaacaaacttacttctcggtaaggaggactcttatgagcaaaacgctttatatcggcggcgaatggatcagtgcagaaaaaaaacagacccgccgtatcattaatccatttaatcaagaagaaattgcaacggtatgcgaaggagaccgggatgatgcggtgaaagccatcgccgcagccagaaaagcatttgatgaaggggaatggccggtgctttccgggctcgagcgcggacaatttgttctgaaaattgcggaattaatcagacgcgatctgaacgaattagctgagctggaatcgcttgatacaggaaaaacgattgaagaaagtaaagccgatatggatgatatcgcaaatgtatttcaatattatgccggtttggcggataaagacggaggcgaagtcatttcatctccgattcccgattcagtaagtaaaatcgtcagagagccaattggcgtatgcggacaaattacgccgtggaactatccgctccttcaggcgagctggaaaatcgctcccgctcttgcggctggaaacacgatcgttttaaagccgagcgagattactccgcttacaaccattaaagtctttcaattaatagaagaagccggtattccgaaaggggccgccaatctcgtgctggggccgggcgcctctgtcggcgatgagctggcgagaaacctcgacgtcgatttggtctcttttacgggcggaattgaaacaggcaaaaaaatcatgcaggcggcaagcggcaacgtgaaaaagattgccctggagcttggcggcaaaaatccgaatatcgtatttcaagatgcagatctcgaaacagctgcagatcaagcgctgaacgccgtgtttttccatgccggtcaagtttgttcggccgggtcacgtcttttggtggacgaagccattcatgatgaatttttagccgagctgatcaagcgcacgaaacgcatcaaattaggaaacggttttcatgaagatacggaaagcggtccgctgatttccgccgagcatcgggccaaagtcgaaaaatacgtagaaatcggtatcgaagaaggggcaaaactggaaacaggcggcaaacgtcctgatgatcccgcccttcaaaacggtttcttctatgaacctactattttctcaaactgcaagtctgatatgcgaatagtccaagaggaaatcttcggccccgttttaacagtcgagtcattctcttcagaagaagaagtgatcagacttgccaacgataccatttacgggctggccggagcggtatggtcaaaggatattgaaaaatgcgaacgcgtagccgccaaactgcggatgggaacggtatggatcaatgatttccacccgtatttcgcgcaagcgccatggggcgggtacaaacaatcgggcttcggccgtgaactcggcaaaatcggcctggaagaatacacggaaatcaaacatatttaccgcaatacgaaacctgcggctgtgaactggtttcaagcataattaggaggagatacaatatgacattaaatatgaaagtagaaagcatgcataaattccatacattcgaaatcccgacagtcattaaacacggaatcggcgcgattcagcacgcgggaagtgaagtcagagcgcttggcgtcacaaaagcgctgctcgtaacagacccgggaatttataacgcgggagtggcaaacccggtcattgaatctttgcaggaagcgggcatcgaagtcgtcctgtttaacaaagtggagccgaacccgcctgtacgtcttgtaaacgaaggatcagaactgtataaaaaagaaaactgcaacggtcttgtggctgtcggcggcggaagctccatggatacggcgaaagcgatcggggtagaagcgacacacgaaggaagcgtgcttgattatgaagccgcggaaggcaaaaagccgctggaaaaccgcattcctccgctgacaacgatcccgacgactgcgggaacaggttcagaggtcacacaatgggcggtcattacagatgaggaaagagaatttaaattcaatacgggcggaccgcttatcgctgcgcatttaacggtcattgaccctgagctgcacacgtccatgcctccgcatgtgacggccatgacaggtattgacgcacttgcgcacgccatcgagtgctatacgatgaaattcgcgcagccgatcactgatgccgtcgctttaatggccattgaatatgcggcgcattatattaagcgcgcgtttgcggacggagaggatttggaagcaagatacggcatggcgcaggcggcgatgcttgccggcctttcatacggcagtgaatcagcaggcgcggcgcatgcgatgagccagacgctcggcggcatcatccctgtcgctcacggacaatgcgtcgcagctatgatgggaccggtaatggaatacaactggaaaggctatccggaaaaattcgcccgcatcgccaaagcattcggaatcgatacaagcaacatgacaaccgaagaagcggccaaagcgtccgtcaactggatgtatgatcttgtaaaagatttagaagtgccgagtttagaagaacaaggtgtgtctccggacatgattgaacgtttatcaaaagaagccatgaaagatccgcagactttcggaaatccaagagatttgaatgagaaagcatacaactggatttacaaacgctgctttgacttaacgccgaaaacggtataataaatgaaccccgctcctttacagagcggggttttttaaggataatgtcaagaaaaaggcggtggtggctgatgtggaaacgcataacagcaaagacggaaggcgtatatatagcggataccgaacaatttgttaccaaaaagatggacaagcttcgcgcggaatacggcgggtttcccggtgacctgcatttcggactgacaaaaaaggccggcgcgcgtgagccgatgtatgaaagaggaacagaaatttttaaccggagacaaatttcaatcgtgtccatggaggaatgtgatgacattgcggagaagatggggatttctcatatctttcccgaatggctcggcgctaacatcgcaatcagcggtttttctgcgctgacgccgcttaaagaaggaagcagaatgatttttccaagcggtgcgtctctgttgtgcgagggagaaaatgatccgtgcattcagccgggagaagtcattcaatccttttatccggctcagccaaaactcgccgcggcgtttgtgaggcacgcgatgggcagaagaggaattgtctgtattgttgaacgcccgggtgatatatgcacgggcgatgcggtcaccatccattcctatgaaccgaaacgcgccaagaaaaaaatcgagaaggtctgactcagaccttctcgattttttgtttgatttcttctatttgatcgatgtgacgcttttcatgatggccgataaaatcaatccactgccggatcgtcagttcttgaaaaacgggatgcggaagcacacgttcaaaatcttcctcgtttaatgatgaaataactgcggtcagctgctgtcttgccgtatctaattcttgttttgcttcaatgactgagattcggttttgctcaggttcgaggtgtgacggcgccggccgtttatttgatctgtcctctataaactccatcggtttgtcttcgatttttttaaacggtgcgtcttttgcctgctttgataaaagggtctgcgctgtttcgtcaattttctttaaatggtcaaggacttcccgcacgctccactcatcagccgcgggctttcggttgaattcctcatcagagagccctttcagtacttcccaggtctgctgtctggcttcattaaaaatgctcatcctatctcctcctttagagtaaacatatcatatccggattggataatcatgtaatcagccttccttatcagaaaattgaaaccatttacctttacatccgtatataaagtaacactccgacacctcagccgaaaggaggatagaatgtggacatatttcatctgccgtttgaaacggtctatctttacacattgattatttcgggaagtctcacgcttttgattctgttttttcaagatgtgtttcacggcctctcagaagccattcctgtttcatttttaaaccctgcattgattctgtcttttttaacaatcttttcagcctcaggttatatcggcgaaatcgccgctccgctatcaagtcctgtcattgcgttgctttcatttgttctttcggttcttttggtcagcctgcttcacttcttcgtccttgccccgctttcatcagcggaagaatcgctcgcatatcgggagacagatttaaagggcagggtcggcagggtcattacttccgtcccgaaagacggctatggggaagtgatcatagagggaatagggggcgccatttctaaatcagccgtcagctttgatcaagaacagatcagatacggaacggccgtattagtgattgacgtgaaagacggagtgctttttgtgacgccgcatgaaccaatctgatatctaagggggaactgttatgactatgccgattatcattgttatcggaatcgtattctttttactcatcgcacttattgctgtatttattacgaagtaccggacagcggggccggacgaagcccttatcgtgaccggaagttatttgggaaataagaacgtccacattgatgaaggcggaaatcgtctgaaaatcgtccggggcgggggaacgttcgtgctcccggtattccagcaggcagaacctctcagtttactgtcaagcaaacttgatgtctctacacctgaagtctatacagagcaaggggtgccggtaatggccgacggaaccgccattattaaaatcggaggctccatcggtgaaatcgccacagcagctgaacaatttttggggaaatccaaggacgaccgtgagcaggaggcgcgggaggtgctggaaggccatctgcgctccatcctcggctccatgaccgttgaagagatttataaaaacagggaaaagttttctcaggaagtccagcgggtcgcgtctcaggatcttgctaaaatggggctgatgatcgtttcttttacgattaaagacgtccgggataaaaacggctatcttgaatcattaggcaagccgagaatcgcccaagtcaagcgggatgcggacattgccacggcagaagcggataaagagacgaggattaaacgcgcggccgctgataaagacgcaaaaaaatcagagctggagcgggcgacggaaatagctgaagcggaaaaaatcaatcagctgaaaatggcggaatacagaagagagcaggatacagcaaaagccaatgccgaccaggcatatgatcttgaaaccgcaaaagcgcgccagcaggtgacagagcaggaaatgcaaattaaaattattgagcggcaaaagcagattgaattggaggaaaaagaaattctgcgccgtgagcgccaatatgactctgaagtgaagaaaaaagccgatgctgaccgttactcggtggaacaagcggccgcggccgcaaaagcgaagcagctcgccgaagccgatgccgagcagtacagcatcgaagcgatggccaaggcggaagcggaacgcgtgagaattgacggtcttgctaaagcggaggctgaaaaggcgagaggagaaaccgaagcggaagtcatccgcctgaaaggtctcgcagaagcggaagctaaagaaaaaatcgccgacgcattcgaaaaatacgggcaggctgcaatccttgatatgattgtgaaaatgctgcctgaatacgcaaaacaagtctcagcgcctctttcaaacattgataaaattaccgtcgtggatacgggaggaagcggtgaaaacggcggggccaataaagtcacaggctacgcaaccaatttaatggccggtctccaggaaagcttaaaagcatcttccggaatcaatgtaaaagagctgattgagaatttttcaggcaaaggaaacataaaacaaagcataaatgaacttacaaaagaactgagtgattctaacgaacggcacagcccggaataaaaaaacagcaggcgtaaaccgcctgctgtttcagttcgtccgcttagcttcaagaagccgcggcgcagtcatgaataataagataaggacaatggccgaaaggataaaagaaggaatcatgtaagtcgcgttatagacggatgaataaatccagaccggcgtacccttcggagcatagcttccgaaaaagactgctccggagaccacatgcgccgcataccgcagcacactgccggtgaaaacaccgcctataacatacatcgttaaagcgcctctttttttattcaatgccgatgctcgtacaccggaagcgagcaagccgctgaaaccgagaactgcaaatgccgcgatataatcaagaaatagctgcaccgggtgctgcaaaaacaaattgccgatggcgatctggacaatccctgttaaaaagcctgtcgtaagcccggccttcactccccagcggaatgaaatcaaaaaaatcggaatcatcataatagagaccgaacccccttggggcatccggagaaacatgcctgagacaatgtccagaatgacagccgccccggtcataatcgctatttcaattaagcgcacaagctgtgttgaatgattcatagttttccccctggtcagacaaccgtatcaaggataaacaaaaaagcagcgcggggaaggatgggaaaaggtccgcgcgctgcttacataaactgcaaatcatttggctttgccacatccctacgccagcgttaactaacaggttcaaagggtcagaacaaaacgttcactctcagctttaatgctccccttgtggtcatcaagtatttagttcaatcttactatacaagaaaatataccaaaccacaagacagcttatctttctatagaagagaaactgaaataagtatgaaagaaaataattaatgattttttttaaaaaactattgtcatattttcaaaagggtgttatattattaaacgtcgctgatgaacagcagacaacaacgaaaagcttcggaaacaacttaaaaaaagttattgacataaaagaagctgggtggtaagataataaagctgcttcaataagcggtcatgatctttgaaaactaaacaagacaaaacgtacctgttaattcaaagttttaaataaatcgcacagtgatgtgcgtagtcagtcaaactaaggtctgcacgatgcagatcacacagacgttactgcaggatgcagtgaacttagtctgtgttccatttatcggagagtttgatcctggctcaggacgaacgctggcggcgtgcctaatacatgcaagtcgagcggacagatgggagcttgctccctgatgttagcggcggacgggtgagtaacacgtgggtaacctgcctgtaagactgggataactccgggaaaccggggctaataccggatggttgtctgaaccgcatggttcagacataaaaggtggcttcggctaccacttacagatggacccgcggcgcattagctagttggtgaggtaacggctcaccaaggcgacgatgcgtagccgacctgagagggtgatcggccacactgggactgagacacggcccagactcctacgggaggcagcagtagggaatcttccgcaatggacgaaagtctgacggagcaacgccgcgtgagtgatgaaggttttcggatcgtaaagctctgttgttagggaagaacaagtgccgttcaaatagggcggcaccttgacggtacctaaccagaaagccacggctaactacgtgccagcagccgcggtaatacgtaggtggcaagcgttgtccggaattattgggcgtaaagggctcgcaggcggtttcttaagtctgatgtgaaagcccccggctcaaccggggagggtcattggaaactggggaacttgagtgcagaagaggagagtggaattccacgtgtagcggtgaaatgcgtagagatgtggaggaacaccagtggcgaaggcgactctctggtctgtaactgacgctgaggagcgaaagcgtggggagcgaacaggattagataccctggtagtccacgccgtaaacgatgagtgctaagtgttagggggtttccgccccttagtgctgcagctaacgcattaagcactccgcctggggagtacggtcgcaagactgaaactcaaaggaattgacgggggcccgcacaagcggtggagcatgtggtttaattcgaagcaacgcgaagaaccttaccaggtcttgacatcctctgacaatcctagagataggacgtccccttcgggggcagagtgacaggtggtgcatggttgtcgtcagctcgtgtcgtgagatgttgggttaagtcccgcaacgagcgcaacccttgatcttagttgccagcattcagttgggcactctaaggtgactgccggtgacaaaccggaggaaggtggggatgacgtcaaatcatcatgccccttatgacctgggctacacacgtgctacaatggacagaacaaagggcagcgaaaccgcgaggttaagccaatcccacaaatctgttctcagttcggatcgcagtctgcaactcgactgcgtgaagctggaatcgctagtaatcgcggatcagcatgccgcggtgaatacgttcccgggccttgtacacaccgcccgtcacaccacgagagtttgtaacacccgaagtcggtgaggtaacctttatggagccagccgccgaaggtgggacagatgattggggtgaagtcgtaacaaggtagccgtatcggaaggtgcggctggatcacctcctttctaaggattttaacggaatataagaccttgggtcttataaacagaacgttccctgtcttgtttagttttgaaggatcattccttcaaaacataggaacacctgctaaatgcgccacttcctgtggcaacgcatgtgttagcatgtcctatgcgttgttctttgaaaactagataacagaagtaattcacattcaattagtaatgcaagatatcacgtagtgattctttttaacggttaagttagaaagggcgcacggtggatgccttggcactaggagccgatgaaggacgggacgaacaccgatatgcttcggggagctgtaagcaagctttgatccggagatttccgaatggggaaacccaccactcgtaatggagtggtatccatatctgaatacataggatatgagaaggcagacccggggaactgaaacatctaagtacccggaggaagagaaagcaaatgcgattccctgagtagcggcgagcgaaacgggaccagcccaaaccaagaggcttgcctcttggggttgtaggacactctgtacggagttacaaaggaacgaggtagatgaagaggtctggaaaggcccgccataggaggtaacagccctgtagtcaaaacttcgttctctcctgagtggatcctgagtacggcggaacacgtgaaattccgtcggaatccgggaggaccatctcccaaggctaaatactccctagtgaccgatagtgaaccagtaccgtgagggaaaggtgaaaagcaccccggaaggggagtgaaagagatcctgaaaccgtgtgcctacaagtagtcagagcccgttaacgggtgatggcgtgccttttgtagaatgaaccggcgagttacgatcccgtgcaaggttaagcagaagatgcggagccgcagcgaaagcgagtctgaatagggcgaattgagtacgtggtcgtagacccgaaaccaggtgatctacccatgtccagggtgaagttcaggtaacactgaatggaggcccgaacccacgcacgttgaaaagtgcggggatgaggtgtgggtaggggtgaaatgccaatcgaacctggagatagctggttctctccgaaatagctttagggctagcctcaaggtaagagtctcggaggtagagcactgattggactaggggcccctaccgggttaccgaattcagtcaaactccgaatgccgatgacttatccttgggagtcagactgcgagtgataagatccgtagtcgaaagggaaacagcccagaccgccagctaaggtcccaaagtatacgttaagtggaaaaggatgtggagttgcttagacaaccaggatgttggcttagaagcagccaccatttaaagagtgcgtaatagctcactggtcgagtgactctgcgccgaaaatgtaccggggctaaacgtatcaccgaagctgcggactgttcttcgaacagtggtaggagagcgttctaagggctgtgaagcaagaccggaaggacttgtggagcgcttagaagtgagaatgccggtatgagtagcgaaagaggggtgagaatccctccaccgaatgcctaaggtttcctgaggaaggctcgtccgctcagggttagtcgggacctaagccgaggccgaaaggcgtaggcgatggataacaggttgatattcctgtaccacctcctcaccatttgagcaatggggggacgcaggaggatagggtaagcgcggtattggatatccgcgtccaagcagttaggctgggaaataggcaaatccgtttcccgtgaaggctgagctgtgatggcgagcgaattatagtagcgaagttcctgattccacactgccaagaaaagcctctagcgaggtgagaggtgcccgtaccgcaaaccgacacaggtaggcgaggagagaatcctaaggtgatcgagagaactctcgttaaggaactcggcaaaatgaccccgtaacttcgggagaaggggtgctctgttagggtgcaagcccgagagagccgcagtgaataggcccaggcgactgtttagcaaaaacacaggtctctgcgaagccgtaaggcgaagtataggggctgacgcctgcccggtgctggaaggttaagaggagcgcttagcgtaagcgaaggtgcgaattgaagccccagtaaacggcggccgtaactataacggtcctaaggtagcgaaattccttgtcgggtaagttccgacccgcacgaaaggcgcaacgatctgggcactgtctcaacgagagactcggtgaaattatagtacctgtgaagatgcaggttacccgcgacaggacggaaagaccccgtggagctttactgcagcctgatattgaatgttggtacagcttgtacaggataggtaggagccttggaaaccggagcgccagcttcggtggaggcatcggtgggatactaccctggctgtattgaccttctaacccgccgcccttatcgggcggggagacagtgtcaggtgggcagtttgactggggcggtcgcctcctaaaaggtaacggaggcgcccaaaggttccctcagaatggttggaaatcattcgcagagtgtaaaggcacaagggagcttgactgcgagacctacaagtcgagcagggacgaaagtcgggcttagtgatccggtggttccgcatggaagggccatcgctcaacggataaaagctaccccggggataacaggcttatctcccccaagagtccacatcgacggggaggtttggcacctcgatgtcggctcatcgcatcctggggctgtagtcggtcccaagggttgggctgttcgcccattaaagcggtacgcgagctgggttcagaacgtcgtgagacagttcggtccctatccgtcgcgggcgcaggaaatttgagaggagctgtccttagtacgagaggaccgggatggacgcaccgctggtgtaccagttgttctgccaagggcatcgctgggtagctatgtgcggacgggataagtgctgaaagcatctaagcatgaagccccctcaagatgagatttcccattccgcaaggaagtaagatccctgaaagatgatcaggttgataggtctgaggtggaagtgtggcgacacatggagctgacagatactaatcgatcgaggacttaaccaatttgaatgtatgcttactgttatctagttttgagagaacactctcaatggtttggtggcgatagcgaagaggtcacacccgttcccatgccgaacacggaagttaagctcttcagcgccgatggtagtcgggggtttccccctgtgagagtaggacgccgccaagccattacacgtaagtgtaatatacggaggattagctcagctgggagagcatctgccttacaagcagagggtcggcggttcgagcccgtcatcctccaccattccaatcatacataagttggcgtattaggccggtgtagctcaattggtagagcaactgacttgtaatcagtaggttgggggttcaagtcctcttgccggcaccacttttatatgttatactatataagtctcttgtaataagagccattagctcagttggtagagcatctgacttttaatcagagggtcgaaggttcgagtccttcatggctcaccatgtttttcttgcggatgtggcggaattggcagacgcgctagaatcaggctctagtgtctttacagacgtgggggttcaagtcccttcatccgcattgccaaacgcggaagtagttcagtggtagaacatcaccttgccaaggtgggggtcgcgggttcgaatcccgtcttccgctccaactatactataccatccatgccggggtggtggaattggcagacacacaggacttaaaatcctgcggtaggtgactaccgtgccggttcaagtccggccctcggcacttattgttgcgcccgtagctcaattggatagagcgtttgactacggatcaaaaggttaggggttcgactcctctcgggcgcgccatacatacttttgaaaaacgggaagtagctcagcttggtagagcacatggtttgggaccatggggtcgcaggttcgaatcctgtcttcccgaccactttggggccttagctcagctgggagagcgcctgctttgcacgcaggaggtcagcggttcgatcccgctaggctccacttgattttaattgtttttggcggtgtagctcagctggctagagcgtacggttcatacccgtgaggtcgggggttcgatcccctccgccgctaccattggacctttagctcagttggttagagcagacggctcataaccgtccggtcgtaggttcgagtcctacaaggtccaccacttatacggaggaatacccaagtctggctgaagggatcggtcttgaaaaccgacaggggtgtcaaagcccgcgggggttcgaatccctcttcctccgccatatctaatttaattatcatcgcggggtggagcagttcggtagctcgtcgggctcataacccgaaggtcgcaggttcaaatcctgcccccgcaaccaaaaaatggtccggtagttcagttggttagaatgcctgcctgtcacgcaggaggtcgcgggttcgagtcccgtccggaccgccatttataaaaaggctcggtagctcagttggtagagcaacggactgaaaatccgtgtgtcggcggttcgattccgtcccgagccaccatttaatttaatattgttttggcggttgtggcgaagtggttaacgcaccagattgtggctctggcactcgtgggttcgattcccatcaatcgccccaaacaacatgcgggtgtagtttagtggtaaaacctcagccttccaagctgatgtcgtgggttcgattcccatcacccgctccatttttatattgtcatgggcctgtagctcagctggttagagcgcacgcctgataagcgtgaggtcggtggttcgagtccactcaggcccaccatgatgatttttccacagtagctcagtggtagagctatcggctgttaaccgatcggtcgcaggttcgaatcctgcctgtggagccatacggagaagtactcaagtggctgaagaggcgcccctgctaagggtgtaggtcgtgtaagcggcgcgagggttcaaatccctccttctccgccataaggcccgttggtcaagcggttaagacaccgccctttcacggcggtaacacgggttcgaatcccgtacgggtcattaaaaaaaccttgcatagtatgcaaggttttttattatgcgttcatagcgtaaatggtaaaagacaggtatgtggcaaaagcgctccataataaataaggaaccagaagccaggctgaagctttactgtatttaccggcaatgagcaacagaatgagtgttgtcacagccacaagcaggcaatcgatagatgcagcaagcaaatttttctgtgtgaattgaaaatagctgaatccttgattcacgatataattgatgagaagcatcacccaaaaagctttggattctttacatgaaaactttgcatatattaaggctgctgagagcgaaataagcgcaaacaaaaccgcccatatgatgccgatcactgatccgcccagcgtccagtcaggtttttgcagcgcgtcgtaccattcccggtcgatgggaaagagaaaccctgctaaagaaaacaagacatatgtaatgataaatacaataatcgcaccgatatacttctttttcatttgttccctccgtcattcaatgtcaatacgttagttccctttcttggaaagattaaaccgttcaaaaggttcatgcaccattaagtgtatgagttttcggtgtgaaaatgcagcaaaccaattatttgtattcaaaaaccccggcctgccggggttttaatcagcatgaaggtcgccaaaggtcgtcataattccttcttcgtccagttcctgctcatatttttcgtgtgccttgcttggatacacggaaatgttttttccggtaatatctgtcgcgataaagttttcataatcctcagcatagccgatgttttcttctgagttcattgtcatatccccatagctgagcggcggatcttctaaatcctgaggcgtttctgagtttccgtatccctcaacatcctgataagcatcttcactatcgtaagccgcccggattgattcatcatcatcaaattcaaactgtccgaacggtgtttcctcttcaatcggcctgtctttggaaacggcatcctgcgaggaatattccgccaatgtcgtagccgtcggcagagcttcaagtctgtcataaggaatgtccttgccgctgacttcacatgtgccgtatgtgccgttttcaatttgtttcagagagtaatcaatatcgcgaaggtgctccctttcatggtcgagcagagccaggtctttttcccgctcgtataattcggtcgcctgatcgccgggatgattgtcataggaagacaattcgccggatgattgatacgggaattcatcagttaactgaaattgatcattttctttaaagcggcttaaaatatcatctctggcttcttccaattctttttttaagtgtgtgatctgttcgtttgtaagcacatcaatccctcgtttctatgtgatgcttactgttagtatgaacgtttttacgcagaaaaatggtggataaaaatagtcattttcccacgaggaagtaaaaggatacagtgattgccgagagtggggaaagaaaattcaagtttgtttctttattcatttgcgcaaaaaggtttataataagaaatgcaggcattttgtcgtgctcaaatctgtgtgtttgacacaaattcatcacaggtgtattgtattaaaagcatttaacggattatggaggaatgtctcatggtgacaacggtgcagcatacgttccgagaggaagcagatcatgcattacataaagccaaacaagtcaaccatgctgtcttattgagctattcaagacgtattgcgtctttagaccctctatcatttttcaaagacggagcaaaaaaatataaaggcaaacgatttttttggtcagaacccggtagtgaattaacaatagtcggtcttggcacagaagcgctgttccaatcgaatgaaaaaaatggaaaacgttatcacgacgtttttgaacaatgggagcgctttaaaaagacggcttttcatattcatgaagaagaagaggcggcgcataccgcggtcggccctgtcttattcggcggtttttcatttaatcccgctgaagagagaggagacgaatggaacgggtttgaagaaggaatgttctttatcccctcactcatgctgacaaagacggcagacggcgattatttaaccgtcaatcaatgggcggcagacggtaatcaggcagaagatacgctgaaacgtctgaaatctttttcagaagcttttgcagtttcttcaattgagtatgaagaatatcctgttttaacaaaagcggaagaacttgatgtggaaaactggcttgaagccattaaaacagcaacaaatgatatgaaggcaaatcaatatgataaagtcgtgctggcaagggaagtcgttttgtcatatgatgggcctattccggcggagagcgttgtccgcaagcttttgacggaccaaacgacaagctatgtttttgcgattgagcagggagataaatgctttgtcggcgcttcaccggaacggctgatcaaaaaatcaggcaaagacgttatgtccacctgtctggcaggttcaattaagcgcggagaaaatcaacaagaagatgaccgtctcggcaaagagctgctgcatgacgaaaaaaatctcgcggaacatgattttgtggttaagatgatacacgattctttcttgtcgagctgcagtgatgtgaaaaagcctgcaggcccgcaattatataaaacaaaaagtgttcagcatctatatacgccgatcacaggcaatctgaaaacgtccgcttcgctgtttgatttaattgaaaagctgcatcccactccggcattgggaggagctcctcagcagaaagctgttgaagttatcgctgatattgaaccgatgacacgcggatggtatgcggctccgatcggctggatggacggcagggaaaacggagaatttgtcgtggctatccgatcagggctgattgaaggcaaaagtgcgcggcttttcgcaggctgcggcattgttgaagattcagatccgcaatcagaatatgaagaaacacaaattaaactaaagccgatgatctctgctttaggaggtgaaaggctttgacaaacccgattacacattatatcggaagctttattgatgaattcgcgctatcgggtgtcaccgacgcggttgtttgcccgggatcgaggtcaactcccctggcggttttggcggcggcccacccggatattcaagtccatatacagattgatgaacgatccgcaggttttttcgcactcggtcttgcaaaagcccgccagcgtccggtcatgctgatttgtacgtcaggaacggcagcggctaacttctatccggccgtgattgaagctcattattcaagagtgcctcttattgtcctgactgctgaccggcctcatgaattgagggaagtgggggcgcctcaggcgattaaccagcattttctgttcggtaactttgttaagtttttcacagactcagctcttcctgaggaaaaacctcaaatgcttagctatatcagaacattggccggcagatccgtaagtgaagccgggaagcgcccgatggggccagtccatatcaatgtgccgctcagagagcctttgatgccggatttatcagccggaccttttgaaagaatgagaaaggggaagcacgtctcagtcacaacagggattcagtcagctgatcaagactctctctgtcatattacagagcgtctcgcgggtaccgaaagaggtatgatcgtctgcggcgaaattcacggtgaagcagaaaagcagcaaatcatcgcgcttgccgagatgcttcagttcccgattttggctgatccgctttcaaacctccgaaacggggagcatgataagacgctgattattgatgcttatgactcgttcttaaaagatgaagaaataaaagaggcgctgcgccctgacgctgtgatccgcttcggtccgatgccggtttccaaaccgctctttttatggctcagagacgatcctgccattgagcagtttatcgtcgatgaagacggaggatggagagatcccacccaggccggcgcgcatatgattcattgccatccgtctgtgtttttggaagcggtccgttcagctgaaaccggaaaacggccgtccggatggcttgagaaatggcaatttgtcaatgaccggttccggagtcatttacaggccgcgagcatggatgatttatcatttgaaggaaatgtatatcgtcagcttcagcaccttgtccctgaaggcagttcgatttttgtcggcaacagcatgccgatccgcgacgtggatactttctttgaaaaacaagatcgttccttccgtgtctatgccaaccgcggcgctaacggcattgacggagttgtctcctcggctatgggactgtgtgaaggtacaaaagctcctgtcacgcttgtcattggagatttatcgttttatcatgatttaaacgggctgttagcggctaaaaaacttggaattccgcttacggttattttaataaacaatgatggcggcgggattttctcgtttttgccgcaggcatctgataagactcattttgaagaactgttcggtacgccgacgggtcttgatttccggcatgccgccgcactgtatggcgggacgtatacttgtcctgagacatgggaagcatttaaggatgcgtatcagccgcaggcggacaagcccggacttcatataatcgagctgaaaacagatcggacatcaagagttcaattccatcgcgatctgctgcaggccgcagtgcgggaagtgaaaaaagaatggaaactgtaacagttaaaacggccgacggcgtatgctatcgtgctgctgatagcggacacggacacgaatcgtctgaagctattgtttgtctgcatggatttacgggcagcaaagaatcatggatgtttttacgcggcatgtttcccggcgagcgaatggtgatgattgactgcctgggtcacggggagacagacgcgcctgtgcaagcggcaaggtatagtgcgagccggcaggttgcggaccttgccgccgtttttgatcaattaaaacttcacaaagtgaaacttattggttattctatggggggaagacttgcgtattcctttgcacaggcatttccgcatcgggtgtcagcgcttgttttggaaagtacaaccccgggcctcagcacgcttcaggaacgcaaaaaacggattcagtcagaccggaagcttgctgactttatattgcgggaaggtgtaacatcgtttgttgattattgggagagcattccgttgtttgccacgcagctttctcttccggacagcgtaaaggcgtccatccgtgccggcaggctgaagaataatccgtccggacttgcaggaagcctgctcggaatggggacaggctcacagccttcctggtgggaggcattacaccgcatcaaggcgcccgtcctgctcatatgcggtgaatgggatgaaaagttttgcgctattaatcaaaaggtgcataacctgctcccatcaagtaaaatagaggttgtcaaacaggcggggcacacggtacatgtggaacagccgcgaatttttggtaagatagtaagtgagtttttatacggcttgtaaagcataaagaaaatagcttttcggccggactcaggcaaaaatgaaggaggtcatatcaatggctgcagaatggaaaagtgaacgtcagtacgatgaaatcctgtacgagacgtataacggtattgcaaaaataacaattaaccgcccggaggtacataacgcatttactcctaagacggtatcagaaatgattgacgcgtttgcttgtgcgcgtgatgactccaatattggtgtcatcgttcttgcgggagcgggagataaagcattctgttcaggcggagaccaaaaagtccgcggtcacggcggatatgtcggagacgatcaaatcccgcgtctgaatgtgcttgatcttcagcgtttgatccgtgtgattcctaaaccggtcgtagcgatggtatcaggctatgccatcggcggaggccatgtgcttcatatcgtctgtgatttaacgattgcggccgataacgcgattttcggtcaaaccggcccgaaagtgggtagctttgatgccggttacggctcaggttacctggcgcgtatcgtcggacataagaaagcccgtgaaatctggtacctgtgccgtcaatacaacgcgcaggaagcgctcgacatggggcttgtcaatacggttgtcccattagagaaacttgaagaggaaacaattaaatggtgtgaagaaatgcttgagaaaagccctacagcccttcgtttccttaaagcggcatttaacgctgatacagacggcctcgccggaattcagcaatttgcaggagatgcaacgcttctttattacacgactgacgaagcgaaagaaggccgtgattcctttaaagagaaacgcagtcccgatttcggtcaattccctcgttttccgtgatcagatgacactacgaaacagcttgagccgctctggtccaagctgttttcttttcaaaaacagtacttttacctcggagatgataacatgctgacagaacagccgaattggctcattcaaagggctcagctgacaccggagagaatcgctctcatatttgaaaacaaacagatgacattcagagaattatatcatgcttctaaacaaatggccgcgcggctgtccaaatactgctcgcttaaaaaaggagacagggccgcgattttgctttctaacagaccggaaatggtttatgccgttcacgcctgcttcttattaggggcggaagctgtgctgttgaatacgaagctctcaaaacaggaacggttgtttcagctcgaagattcacaggcaaagcttttattgacggaggacggtttttgccgcgaagaatatgaatctgcggtcgccaccgcagatgtggacgagctgcaggctgaagaggcgggtgacatggagccggaagcttatgtaacgcttgatgatacggcgactcttatgtatacgtcaggaacaacaggaaggccgaaaggggtgcagcagactttcggtaatcattattccagcgctgtatcgtctgcgctgaatctgggggtcacggagcgggaccgctggcttattgcgctgccgctgtttcatatcagcggtctgtctgcgctgtttaagtcggtcatttacggcatgcccgtcgtgcttcatcaaaaattctctgtcactgatgtgctggacagcatcagctcccatcaggtcacgatcatttcagcggtgcagaccatgctctcgggcctgcttgcggaaactgaacaatgtcctgaatcactgcgctgcattctgcttggcgggggtccggcaccgctgccgctccttgaagaatgccgcaggaaacaatttccggtattccaatcttacggcttgactgaaacctgctcacagattgtcacactttctccggaattcagcatggacaagctcggctcggccggtaaaccgctgttttcatgcgaaattagaattgaaaaagacggaaacccttgtgcgccgtttgaacatggtgaaattacggtgaaaggcccgaatgtaatgaaagggtattatcatcgtgacgacgcgaaccaggccgcttttcataatggatggttcaaaacgggcgatcttggctatttggatgatgaagggtttttatacgtgctggacaggcggtcggacctcatcatttcaggcggagagaacatctaccccgcagaagtggaagcggcgctgcttgcccatccggctgtagcggaggccggtgtttcgggagccgaagatccgaagtgggggaaagtgccgcatgcttttctcgtgctgacttcttctgtcagttctgaggagctgaccgccttttgccgtgagcggcttgcaaaatataaaataccagctgcttttttcaaggttgacgggctcccgcggaacgcgtccaataaactgatgaggcatcggctgaatgagcttcgtaaaggagaattgtcatgattaagattgaaaaaatcaccctttatcatgtaagtatgaggctgaaaaaaccgtttaaaacaagtattgaaacgctgcaggatcgtaaatttttgatcgtggaagcgatcgacgaaaccgggagaaccggctggggggaggtatcggcgttttcttctccgtggtatacagaagaaacgattcagacatgcgcgcatatgctgagagattttttcatcccaaatgtcgtaggccgcgcgtttttccatccgtcagaagtgcctgacagtctcgcgcgtttcaaaggaaaccgcatggcaaaagcggggcttgaatcagccgtgtgggatctatatgccaagaaaaaggggatatctctcgcagaagccttagggggcaaaagagataaagtgcccgccggcgtggcggtgggtctggcttcggctgatgagatgcttcgggaaattgagcaatacgtaaaagaaggttatcaacgtataaaaataaaaattcagcccggccatgacgttgatctggtcagagccatccgcagccgttttccgaacgtgccgctgatggcggatgccaactcggcttatgaactgaaagacatcagcaggctgaaagagttggatgaattccagctcatgatgatagaacagccgcttcaggcagatgatattgtcgatcaccgccacctgcagaaacacttaagaaccgcggtatgccttgatgaaagcatatgctcttatgatgacgcaaggcgggcgattgagcttgggagctgtaaaatcattaacataaaaccggcgcgtgtaggaggcctgacagaggcattaaaaatacatgacttatgcagagagcatcacatgccggtttggtgcggcggaatgtttgaaaccggcatttcgagagcgcagacagtcgcgcttgcttcgctgccgcaatttacgataccgggtgatatttcctcatcagaccgatactgggaggaggatattgtcactcccgatatccgtatcgaagagggattcatctctgtcccggacggtcccggactaggtgttgaagtcaatcaggaaataatgagaaaatacgtcacccaaatggacgtttttacgacaaacaactgataaaaagacatttcagcgagttgagctgcctgtacgctgctgttatattgaagctgttcattatcaccccttcccccgtttgaaccggctgtatcagccggtttttttaataggcggatgcgatgatttttttattcttcaaacagtgccggctttacaacgcaggtgctgctttccggctggggcaaacatgtacatcttgataaaaaattctgagcttgtcatgaatgcgatactgattgtaccgtctgccgcctatatttgccgccgaaccgcctttttgccatgcttctcatccgcgcggttttctccggctcagggaggcttgcggcggaaatgaaaaagagctgtataaaacagctcttttcttttataaatcttgcggtttaaaggttttgcaatccgtttcttcacttttttcagcggtttcgcctgtatggctgaccacataaatagcgtcggccgtgcatttgtttcctctgccccaatatgaacagttattgacttcacacagaattttttggtccatgctggctcccctccaagataaaaggtacgccattagtatgagccgccctgatttttgttattcctcctggcggatataacgtctgtctttcataaagagcttccagaagaaataaaacccggggaacaaaatgatgaaagcgacgatatacgtcataaacagcgccctgaaggttgccggctccgtaaatcctgacatgaccgtaatatccggataaatcatataaggaagatgagcccgtccgtatgcatagcttgccagaaagtattggagcgcaatggcgatcatggcgattctcggtttgccgaggttgcggccgaagcgcttattcggcaaaaacagagccacgccggcaatgataaatgtaatgacagacagaatgagccatgtcttgtctttcatcatccccgtatacagccagccggcttcagagcgtaatgtcagcataatgaagaaggcaaacagaagcgacagcggccctgttattaaagagctccgtctgtagatgcggtacgcatgctcctcttccgcaacatttgaaaaatcggccagaagcagtgaagataaaaataaagtgcttaaaatggcaaagccgataaacgcatacgcattaagacttgtaaagacatttgccaaattcaggtgatacactccgcccgtcttctcaataaaccctccgtgtgtgaccggaaggaccaaaatcagcacagcgggaataatgaagcctgaaattccggagatatatctcatgatttttctttccttcgccgtattggagaagacgagaaagccgctgcggatggctaagagcagcaaaataatacttcccgggatcaataaaacggttcccagcacgaaggttgcccctggaaagaagctgaatagggcgacaacgatcgcgacgataaagacgttggtcacttcccatgtcggggacaaataacggttggcgatgtttgtcgcctttgtttgttctttatttaaatatatcatcgaccaaaagccggctccgaagtccatcgttgccatgaccgcgtagataaacacgaagccccatacgattgatatcgcaatgagagcatccatggtaatgtccatttcaattcagccctttctattgttaggattccgccgcttttacatcctcctcaacaggatgtttgcggaaataataaagcagcacataaatgactgcggctgccaaaatggcgtaaaccactgtgaacaggatgaacagcaaaccgattgaaccggttgtcgtgacgacatcagacgttttcaggagatggtaaatcacccatggctgccgccccgtacaagcgaatatccacccgaattcaattccgatcagactgagcggtcctgcggttaaaaataaaatcaaaagccaagtcggaaagctgtctttctttaaaatttttctccacacgatgccgatgatggagtacaaaatgagcagcatcccgatgccgaccattccgttaaacagtgtatggatgaataaaggcggccactcgtctttcggaaacgcgttcaatcctttgacgacggtatcaaagctgtttgcggccaaaaagcttaaagcccacggcacttctatcgcccattttactttttcttcttttgcatcagtaaaacccccgatcgcaagcggagcgtgtgatctagtttcaaacagcccttctgcgcccgcaagcttctcaggctggtattcgtaaagaagctgggctgactcgtgaccgtttaaagaagcaataatagagaatatcccgccgatcgttaaagcgagcagcagcgcttttcggtgaaagcggtatacctgctcctgttttctcgttctcagcattttataagccgcaactgacgcgacgataaatgcaccggtcatgaaagccgtcagtacgacatggcccgcggtggtgaaaaagcttggattaaaaaacgctgcccacggttcgacgtcagtgattttgccgtttaaaattttaaagccggccggcgttccttcaaatgcgtgaacatttgtgattaagacggcggatgccgcggcgccgatcaaaacgaaaataacggcaatgatgcgcatcgccggagtcagccggtcagcggcgtagacataaatggacataaacagcgcttcgataaagaaagcataaatttcaatctgaaacggaagtgacatcaccctgccgatgatctccatgaatccgggccacaaaagggcaagctgtgtacccgcgatcgttccggtcggtatcgccacgccgagcagaacagcctgcgccttcgtccaccttttcgccataatggcataatgcggatcttttgttttttgataaatcaattcggccattaaaatcatcagaggcaagccgacaccaagcgtcgcaaaaataatatgaaagcccatggttgtcccgaacagacttctggctaatactaaatcatccacgatcataaaccgcctttctaaattaccgttttatgtaatgtggttatattatttgctgaagcgattagattattcttccgattccatatatgtgcagggtttagaaatcaagggatcagggcatatatgattgacaagcgcctatttaaggtttagaataaaacgtaattattacgatttaagaaagggagatcaccatgaaaaaagatattcatccggataaccaccaagtgatttttcaagatgtgaacagcggctaccgctttttaagccattctacgaaaacgtcagaggaaacggcagagtgggaagacggaaaaacatacccgctgattaaagtggaagtcagctcagatacgcatccgttttatacgggccgccaaaaattcaacgaaaaaggcgggagagtcgaacagttcaacaaaaaatacaatatggggaaataagacaagcccaatagggtttgtcttatttattgagcactttatcatctcgtgcggggagtgacgaaatgacccgccttatgttatattgtgaataaaaaagcagaaaggaaacaccaagatgagtcttctaaacgatatcatgcaatttaatgagcagttcactaaaaacaaagattatgaaaaataccaaacatctaaattcccggataaaaagatggcaattttgtcctgtatggacacacgtcttgtagaattgcttccgcatgcgatgaacatgcgaaacggcgatgtgaaaattattaaaagtgccggcgcgcttgtcgcccacccgttcggaagcatcatgcgcagccttttagtggccgtatacgaattaaacgctgatgaagtctgcgttatcggccaccatgattgcggcatgagcaaaatcaacagcgaggatatgcttgataaaattatcgaccgcggtattccgaaagagcggattgacatgctgaagcactcaggtgttgatcttgatcaatggctgaaaagctttgattcagtagaagcgagtgttacagacagcgtaaacgtcattaaacaccatccgctattccctgacaatgtcccggtgcacggtctggtgattgatcctgaaaccggtaaacttgatctggtgatcgacggctaccagcatatggactaatgttttcgttttttgtccggtacgggatcaacaccgcccggatgaaaagggtggcactttaaaatccgcttcagtgtcagccatccgccttttaatgcgccgtgagtcttgacggcttcgattccgtactgtgaacacgtcggataaaagcggcatgacggcggcgtcagcggagagatgaacttctggtatccgcggatgagcgcaatcattatggttttcattaaaaaaccacctttctgatgctagtatagaaaaaaaatttcagattgaaaagctttcgccacaattcttatcggaaaactgtgttataatggatgcatattctgaaaaaaagggagtgccattatgccttcagtagaaagttttgagctagaccataatgcggttgtggctccgtatgtaagacattgcggagtgcataaagtcggaacagacggcgtcgtgaataagtttgacattcgcttctgccagccgaacaaacaggcgatgaagccggatacgattcatacgcttgagcacttgcttgcgtttacgattcgcacacattctgagaaatacgatcacttcgacatcatagatatctcaccgatgggctgccagacaggctattatcttgttgtcagcggcgagcctacagcggaagaaattgtagacctgctagacgctacgctgaaagaagccatcgatattacggagattccggcggccaacgaaaaacagtgcggccaggcgaaacttcatgatttagaaggcgcgaaacggctgatgcgtttctggctgtcacaagataaagaagatttgctgaaagtgttcggataaaaaacaggcctttttgctgacatgcaaaaaggcttttttacatatttctaaaaaatgtcacaccttatgtgtaagcgtttgctaaaatagaagcaaacatgaaggagtgatgggatgaaacgggctgtattggcaggtatgtgcggtatggtatttctattatcttcctgcgggggcaattcggacaaaaccgccgcggatgaggagcctaaagcgcttgaggtcaagcttacaggaccggaaacggcagcaccgcatgaaaaaacggaatacaaggcggaggttttttacggcggcaagcgtgtcacggatgcggatgaagtcatgtttgaagtatggaaagaaggaaaaaaaggcagcagcaaaacaagcaaggccaaggaggaaaaaggggcgtatcacctgcggactgaatttgatgaagagggtgtgtataccgttcaatcccacgtaacggcaaaacagcagcataatatgccgactgtaaaagtacgtgtcggggatgctgaagctgccgatgattcctccggccatgaggaacagacgcatcatcattaaggattgtttttatccgtcaagccttttgatgcgtcctccggcgggtcaatcgtatgttttacgttataagctcttacagtcgaccagatggataaaagcagcacggcgagcacgataagaaagccgaagctcagaagaagcagcatgaaatccctcctttttaacaaatcataacatattttccatccgtaaaatcaagggctaaaaatttatgttttaacacacgatatatagggtatatcaatagtaaatcaaaggaggaagataggcatgtcagaaaaactattggaagcggtcaataaacaagttgcaaactggacggtcatgtatgtgaaattacataactatcattggtacgtcaaagggaaggactttttcacattgcacgaaaagttcgaggagctgtataacgaaacggctacatatattgatgatctggcagaacgtctgctggcattgaacggcaagccgatcggcacaatgacggaatcattgaagagtgcttctataaaagaggcggaaggcaatgagagcgcagaacaaatggtacagaacatttatgatgatttcactgtcattgcggaagagctgaaaagcggcatggatctcgcagatgaggtcggagacgaaacgaccggagatatgctgcttgccattcaccagaatatcgaaaaacataattggatgctgaaagcgtatttaggataatcaacaagggaagaccggggctataaagcactcggtcttttatttggctgccgaagagaggtgttgtccatttttctgaaaaatccagtccgttccattcacttttcatagaataatgtaaggccgtttctgtgaaaggatgttggatcaagtgggcaaagactttggcatcttttcgttttttgcagtgatcgtgtcggcagcggggtttttctttggcggttttcagtattcgtttctgattttgctatcggtcatggcgattgagtttatcagtacaagcttaaaagaatctcttttgcagcagctgagcgcaagaaagctttttgcgcggctggtcaaaaaaatcgtgaccctggcattagtctcagtttgccatttttttgatcagctgcttcattcagaaggcgccatccgcaatttggctattatgttttatatcttatacgaatcggttcagatcgtgattacggcaagctcgctgggcatcccggttccgcaggtgctcgtcgacctattggatactttgaaaaataaattcaagcgcaaaccgtaacatttgcttcaaaggaggctatactagcgggtatgatggttttcctctgaatttttgataaagggcttccgaacaaacgcaactgtggtatgatgtatggaagatatgaaggaacggattagagggataaacatgtacgagtttaaagactattatcagaatactgttcagctctcctttgaacaccagcctttttcagacagcccgaagcatgtatgggtcatatgccgatatggagataagtggcttttgactgagcacgaagaccgggggtttgaatttccgggcggaaaagtggagccgatggaatgtgcggaggaagcggccctgcgcgaggtgaaagaagaaaccggcgccgcggtaagacatctgaagtacgtcggacagtataaagttctcggcagggaaaaggtaatcgtgaagaatatttattttgccgatattgaaaagcttgaaaaacaggctgactattttgaaacaaaggggccggtgctgttcagcgaactgccggagaatctcccccgaaataaaaaattcagtttcattatgaaagattcggtgcttccgatcagtctgaaaaagctgaaagaggacggcgtatttcaatcataaaaaacggagacccggcgcttacgcacgggtcttttttatatttttcctttcgtccattttctttctaacagttcgactccctgatacatcaatgtcgcaaaaatcgcgatgatcagaaggcttaagaacacaagagtgaaattgaagacctggaatccgtaaatgatcatgtagcccagacctttttcggaaacgagaaactcgccgacgatgacaccgacccaggataaaccgacgttcactttaagcgcggaaataatcgcgggggcgcatgccggcagaatgacttctttaaacatgatgcttcttttcgctccgaaggttttcatcaccttaatatagttttcatccacttcctgaaaagccgtaaagacgacgattgtcgtgataatgacactgatgactgctcccatggcgacaatgcttgtgaaattcggtccgagtgccacgatgagaatcggtccgagtgcgaccttcggcatcgcgtttaaaatgacgaggtacgggtctaaaacccgggcgagtctgtttgaccaccataacagagcggcgaggcatgtgccgagaagcgtgccgagcaaaaagccgagaacggtttctcctaaggttacgccgatgtgcgccgcaagggatccgtccgcaatcttttcaactaaaagcctgcaaacggcggagggtgagctgaagattaacggatcgatccagcccgccctgctcgatatttcccacccggcaaaaaatacgatgaaaatggcggcctgatacgcacggatccggagcttttctttttggtgtcttttcttaaactgctgatgaagctgttcaatcgtgccgctgctgtttttcaagggaattcagctccttccatatggtttgaaacagcggctgaaaggccggatcctgacgcgcgtcaaacggatctaaagccgcgagctccttaggcacggtgaatatttggtggatggtgcccggctgattcgaaaataaatagatcgtatcgctcatggcgatggcttcaccgatatcgtgggtgacgagcacggcggttttttgaaaatcctttaatgttctgaagacaaggttttccaaagaaagcttcgtttgaaagtccagcgcggaaaacggttcatcaaggagcagcagtccagggtccggcgcaagagttctggcaagtgccgcccgctgccgcattccgcctgagagctctttcggatatttcttttcaacgccgattaatccgagcttaggcagaaggctgagaacttcagctcttttttcttctgttaatgtttttgaaatgtgtaaaccgagcagcacgttttcctcaatcgatttccaaggaaataaataatcctgctgaagcatataaccgatttggtgttctttatggttcggcacgcttccttcgatcagcacccggccttgcgcaggggtgataaggccggccagaatggacaggagtgttgtttttccgcatccgctcggcccgagaaaggagatgaaatcccctttttcaatctgaaaatgtatatctttcacggcggttgtcttttctttaagcgagaaataagtatgtgttacatgatccacatgtaaaaaagacattcatgttcctcctattgttctgaggtgacttttttggcgatttttgtgttgacgagtttgctgtacggaatgtgtttcgggagctctccggcttcatccataatagattgaagcagttcccattcatccttttgcagaactgggtctgcagagaatgacttttgttttttatagcgctctatcgatgtttcgataatggccgggtctgtatcggcaaattccttctgaatcgtttttgcgatgtctttggccggatggctttccacccattgctgggcgcgatagatggcgcgggtgaatttttccgccgtcttttcattgtttttcaaataactttcttttgccataaaggttgtgtatggcacttggccggaagcttctccgaaggatgcgacgatatgaccgatgccttctttttcaaattgggatgccgtcggttcaaacagctgcacataatcacccgttccggatgcgaatgcgttggaaatattggcgaaatcaatgttttgaacgaggttaatgtcttttttcggctctatgtgattctttttcaggacgtactcaccggccatttggggcatgccgccttttcgctggccgagaaatgtttttccttttaaatcgttccatttgaatgatttctcatccttccgcgacacgagaaatgtgccatccgtctgcgtcagctgcgcgaaattgatgaccggatcttttgctccctgcgcctccacgtaaatggatgtttcagaaccgaccagcgcgatgtctgacccgtttgacaaaagcgatgtcatcgttttgtctccgccccatgttgtttgaagtgacacttggagcccttcttttttaaagaaatcttttgcttcagcgacatacagaggcgtatagaagatggagtgtgtgacttccgccacctttaccttcgtcagactttcttcctgtctgcaagccggaagaatgagcaggaaaaaggcgcatatgacaaaaacgcagcccgctttgagccatttgttcacggtgtaacctccttgttttaagcgttaaaataaccttttctgctttacatatcgtatgatgggtataaaaaatgtgtgagtgcccatattcacgttgggaaagaataaaaaaactgatgatctaaggaggcgcattgttttgctggtagaaaagaaaaggttcccgtctccgagtccgcatgtccgcctctttgcggtatgctatgagtcagaagggctgaaggtaaaggggctccttgccgagcctgcggcgccgggaacatatgacggttttttatatttgcgcggcggcataaaaaatgtcggcatggtacgccccgggagaatcgttcaattcgcttcccaaggctttgtcgtgtttgcgccttattacagaggcaaccagggcggcgagggaaatgaagattttgcgggagaggacagagaggacgcgttttccgctttccgcctgcttcgggagcatccgaacgtcagggaagggcgggtgcatattttcggtttttcccggggcggaatcatggggcttttgaccgcgattgaaatggggcatcaagcggcttcactcgtttcatggggcggtgtgagcgatatggtgctgacttatgaagagcggaaggatatgcggcggatgatgaagcgggtgatcggcggcacgccgaaaaaggtgccggatgaatacagatggcgttcgccgtttgaaaaagcagaccgcattcaggcccctgtgctgctcatccatggagagaatgatgaaaatgtttcgatcgaacacgcccggatgatcgaggacaagctgaaagaggcggggaaaccggtggaaacttggtattacagcggttttacgcattattttccgccgcaggaaaacagacgcattgtccggcggctggcggaatggatgaagacacggtaagatgcctgatttatgatatgataataaagaataagagaatgaaaggggattttcattttgggaatgcctgttgaatttaataccatgattgtgacaaaaggcaatgaaaaacggatagaggaaaatatctttttattggagaaagagggctaccgcgtctatcctcttgatattccgatggacgtgcgcaaaacgaaaaccggcgagaaatccggcaccggcgaggtccagaagctcgaatgggcgaacggccggacaagcattacatacagactcacttcgcttcattcgacaaactgaaaaaacaaaagccgagggcataaacgcccttggcttttttgattacacgagaggtccgccggttttggcaatcgagtctgcatgggaaaactttttaaagttttctttaaactcattggctaaaaacagcgctttttcgttgtatgcttgtttatcgctccatgtgttttcaggctgaagaacttcatccggcacgcccggaacatgaacgggactgtgcaggccgaaaatgctgtctgccgtcatgtcagtctggttcagtctgccgtcaatagcggccttgaccatcgctcttgtatacgaaagtttcatccgttctccgactccgtaccctccgccggtccagcctgtgttgaccaggaagacttgaacgccgtgttcgtcgattttacgcccgagcatttcggcatatacatgcgccggaagcggaaggaacggtgaaccgaagcacgtcgagaaagtcgtttgcggagatgtcacgccgcgttcggttcccgcgagtttactggtgtatccgcttaagaagtgatacatcgcctgttccttcgtcagtttgctgatcggaggaagcacgccgaatgcgtccgccgttagaaagacgatcgcctgcggatggccggcaatgctcggctgcacgatattgccgatcatctcaatcggatatgcggctcttgtgttttccgtgtagaaggaattgtcgtaatccgcttcacccgttttttcatcaagcacgacattctcaagaacagacccgaagcggatcgcacgaaaaatctgcggttctttttcctcgctcagattgatacatttagcgtaacatccgccttcaatgttgaaaacgccggaatctgaccagccgtgctcgtcatctccgatcagtttgcggtccgcatcggctgaaagcgtcgttttccctgtgccggaaaggccgaaaaacagggcgacatcgcctttttcaccgacgttggctgagcagtgcatcggcagtatatcctgctgcggaagcaggaagttcataatggagaatattgattttttcatttctccggcgtattcggtgcccccgattaaaatgacgcgcttttcgaaagagacaatgataaatgtttccgaatgcgtgccgtccgtctccgggtctgctttaaaatgcggagctgagagaatggtgaaaggctgcgcttgcgggtctctttcatccgtttccggtctgataaacagctggcgcgcgaataaattgtgccacgcaaattcatttacgaccgtaatcggcagtctgtatttttcatccgctcccgcgaatccttcaaacacaaacagttcatcccgctgttttaagtagctgacgactttggcgtacagcttttcaaacgcctcttcagaaatgggctgattcaccgcgccccaatcaatttgattttctgtgctttgttcacggacgataaatttatctttaggtgaccggcctgtatatgcgccggtagtggcgcgtacggcgcccgttgatgtcagcgttccttcatttcggctgatcactttttcggtaagttttggagccgataaattatgatgcacattcggacttgcaagtaatgcttgaagatctgcggttaaatcaactaatttcataaaaaccttcctttgccggtttatttgtatttcgctgaatgtggaattagtataacatatatctgaaaatagtctatactatttacggttttttgtttgtgtttttccattgcttcccgaaataaaggcgcgcaatcgctttaattcatattgacactttccgcccttttacgataagatatttcattgagcggatactcttatcccgagctggcggagggacaggcccgatgaagcccagcaaccggtttctctgtaaaaaagcaggtgaaaacactgtgggaaaccaaggtgctaacctgatgcaaggtttaatattttccttgagcgataagagtgaaaggcacacagaccaaaccctttcctcgagtggaaaaggtttttttatttcataaaatatgccaattaacattctctgatatagtatgacattgtattaagagggagcgagttccgtatcatatgagaaggtcttgcaaaagatcttttttcaggaggaaaagtgaatgagtaaaaaccgtcgactatttacatctgaatctgttactgagggtcatccggacaaaatctgtgaccaaatttctgacagtatcttagatgagattttaaaaaatgacccgaacgcgcgcgtggcctgcgaaacatctgtaacgacaggacttgtgctggtaagcggagagattactacgtcaacatacgttgacattccgaaaacagtccgtgaaacgattaaagaaatcggctacacacgcgccaaatacggatttgatgcggagacttgcgctgttttaacatcaattgatgaacagtctgcggatatcgcaatgggtgtcgatcaggcacttgaagcgcgtgaaggcacaatgagcgatgctgaaatcgaagcaatcggagcgggagaccaaggcctgatgtttggttatgcgtgtaacgaaacgaaagagcttatgccgcttccgatctctttggcgcataaactagcccgccgtttgagcgaagtccgcaaagaagacattcttccgtaccttcgccctgacggcaaaacgcaagttaccgttgaatatgatgaaaacaacaagccggtccgcatcgacgcgatcgttatttcaactcagcaccacccggaaattacgcttgagcagattcagcgcaatctgaaagagcatgtcattaaccctgtcgtgcctgaggaactgatcgatgaagaaacaaaatacttcatcaaccctacgggacgtttcgtaatcggcgggcctcaaggtgatgcgggtcttacgggccgtaaaatcatcgttgacacatacggcggatatgcacgtcacggcggcggcgcattctccggtaaggatgcgacgaaggtagaccgttcagcggcatacgctgcgagatacgtagcgaaaaacatcgtggcagcaggtcttgctgattcttgtgaagtgcagcttgcatacgcaatcggcgtggcacagcctgtttctatttccatcaatacatttgatacaggaaaagcttctgaagaaaaactgatcgaagtcgtacggaataacttcgacctgagacctgccggcattattaaaatgcttgatctgcgccgcccgatctataagcagacagctgcttacggccacttcggacgtcatgatgtggatcttccttgggagcgtactgacaaggcggatgcgcttcgcaaagaagcactaggagaataattttatagccgcttacttaagcggctttccctttttgtagatgctgccatgcttattttttacatagcgtgaaaccaatggcgtaacaaagcgtctataaaaagggggtccaattagaaaattacacttatggaggctatactatgtgtggatttgtcggtgtttttaataagcatccattaactcaaaccgcagatcaagaagagctaatcaaacaaatgaaccaaatgatcgttcaccgcggtcctgacagcgatgggtattatcatgacgagcacgtcggattcggcttcagacggctcagtattattgacgtagaaaacggcggacagcctttatcatatgaagacgaaaaatattggatcatttttaacggcgaaatctataactacattgaattgagagaagagcttgaagcgaaaggctacactttcaatacagattccgataccgaagtgctccttgcgacataccgtcattataaagaagaagccgcttcaaagcttcgcggaatgtttgcgtttttaatctggaacaaagctgaccgcgtcatgtacggcgcgagagacccgttcggaattaaaccgctgtattacacaaccatcggggacaaagtatattttgcatctgaaagaaagagtttaatggccgctcaaaacggtattgatcttgatacagcttctttacagcaatatatgtctttccaattcgttcctgaaccgagcacgcttgacgctgaagtgaaaaaagtcgagccgggcagccagtttacgatccgcccggaaggcgacatcgcgtttaaaacatatttcaaagcgaacttcaagcctgttcagtctgatgaagataaattggtgaaagaagtcagagacgcaatctttgactctgtcaaagttcacatgagaagtgacgttcctgtcggttcgtttctatccggcggtatcgactcttcttttatcgtttcagttgcgaaagaatttcacccgagccttaaaacattttccgtcggttttgagcagcagggctttagtgaggttgacgtagcgaaggaaacggctgccgcgcttggtattgaaaatatcagcaaagtcatttctcctgaggagtatatgaacgagcttccgaaaatcgtctggcactttgatgacccgcttgcagatccggcggcgattcctttgtactttgtcgcgaaagaagcgaaaaagcatgtaacggtcgcgttatccggggaaggcgcggacgagctgttcggcgggtacaatatttaccgcgaaccgctttcgcttaaaccgtttgaacgcattccgtccggtctgaaaaaaatgcttcttcatgtggcgtccgtcatgcctgaaggaatgagagggaaaagcctcttagtccgcggctgcacaccgcttgaggagcgctatatcggtaatgcgaagatttttgaagagcccgtgaaaaaacagctgctcaaacattacaatccagagctttcataccgtgatgtcacgaagccgtactttacggaaagccgttcatacagcgacataaataaaatgcagtatgttgacatccatacgtggatgcgcggcgacatcctgttaaaggctgacaaaatgacgatggccaactcattggaactgcgcgtgccgttccttgataaagtcgtgtttgacgtagcttcaaaaattccggatgaattgaaaacgaaaaacggcacgacgaaataccttctgcgcaaagctgctgaaggggtagtgcctgatcatgtgcttaaccgcaaaaaactcggcttccctgtgccgatccgccactggctgaaaaatgaaatgaacgaatgggttcgcaacatcattcgcgaaagtgaaacagacgcttatattgaaaaggattatgtccttcagcttctggaagatcattgtgccgacagagcggacaacagccgcaaaatctggaccgtgctgatcttcatgatctggcacagcatcaatgtcgaaaaaagactggtgccggaagagctgaatcatcagccgaaagaagtcattttcgtttaatccaaaaggctttcgagttatcgaaagccttttttctattgttttttgtaaaccgtctattccgctctgttttcgacaaagtattacgcaatattcagaaaaaggttataataggactaatcgggtagattccggaaaaagttttctggctatttcgtctcggtttgttgtttctttgtcaaaatcagggggagggagagttatgcaaaacaaagaaaaaacgcttcaccgcggcttggaagagcggcatatctcgcttatgtcgttgggcgccgcgattggagtcgggctgtttctcgggtctgcttctgccataaagcttgccgggccggggattttagccgcttacgcctgcagcggactgattatgttttttattatgcgggcattgggggaaatggcgattcaaaagcctgtagccggttcattcagccggtatgccagagattatatcggcccgcttgccgggtttttaacaggctggaattattggtttttatgggtcgttacctgcatggcggaaatcaccgcggtcggcatttatatgggctactggttccctgacgtgccgtcatggatctgggcgctttgtgcactcgtcattatgacggctgtcaactttctggcggtcaaagcgtacggtgagcttgaattctggtttgcgctcattaaagtcttggcgattctgtcaatgatcgcgatcggtctggtgatgatcgtattcggtctcggaaacggaggcgttgcgctcggaatcagcaatttatggagccacggcggctttttcccgaatgggattaaaggggtgctgctgtcgcttcagatggtcatgtttgcttatctcgggattgagctgatcggtgtcacagccggtgaggtcaaaaatccggaaaaatcactggcgcgggccatagatactgttttttggcgcattctcattttttacgtcggagctttgtttgtcattatgtcaatttatccgtggcaggaaatcggttcaggcggaagcccgtttgttttgacatttgaaaaaatcggaatacccgctgcagccggaatcattaattttgtcgtattgacggcggctctttcttcctgcaacagcgggatcttcagcacggggcgtatgctgttcaatctggcggagcaaaatgaagcgcctaaagcatacggtacggtcacaaaaggcggtgtgccgggaaaagcggtattggtttcagcgggtgcgttatgcatcggcgttttgctgaactacgtggtgccggcgaaagtgtttacgtgggtgacgagcattgcgacgttcggagcaatttggacatggtcgattattttgctttcccaaatgaaataccgtaaaagcttacagccggaagaacggaaaaaactcaaatataaaatgcctttataccccttttcctcatatatctcgctggcatttctggcttttgtcgttgtgctgatggcttttgatgcagagaccagggtggccgtcatcatcggtcctgtctggttcggcatattattagccgcctattacggcaaaggattccataaaagaaaagacatagatctggaaaacggacagacattcgccgaaaaagcgtaaaaaagagcccgctgaaatgggctcttttttcataggatcgggtaaaagggggaagaataaaacaaattcctgaacattttgcttctgtttcctgacaatcgggagaatgcaaatggtttttacttaaataatattttgaaaaatggtacagtagtaaaacaaagctgatcttttttatttctcttgcattgttttatagtatcggcctttttcaacatattccgttctgattctttccatgtcccgtatgtcttcttctgtcagccggcggataacctttgcgggccggccgaacgcaagacagccgggaggaatggttttgcccggaggaacgagacttccggcgccgataaacgcgccttctccgatttccgccccgtcaagaatgacggagcccataccgattaaagcattctttctgatgattgcgctgtgcagtgtaacctgatggccgatcgtgacgtcatcttcaataagaagcgggcggttcgggctttgatgcagacagctcaagtcttgtatgctgactctttttccgatccttgtcggcgcaacatcccccggatgactgccgagaaccaaatgctcgattgttctccgatcacgacgtcgcccgttatgacggcgttatccgcaatgaacgcttcaggatgtacgtcaggcgtaaattgtttataagggtagattatcatgtctcatccttctttctctaaatttatgtaagaggtgaactgcatgtggacttggaaagcagacaggcccgtcggtaccattgtcattatccacggggcgagcgaataccacgggcgttataaatggctcgttgaaatgtggagatcttccggatataacgtggtgatgggcgatttgcccggtcagggaacgtcgacccgcgcccgagggcatattcgctctttccaagaatacattgatgaagtagatatatggattgataaagcgagaacgcttgaagcgcccgttttccttttgggccacagcatgggcggactgattgcgatagaatggtttaagcagcagagaaatccccgcattacggcactcattttatcatcaccttgtctgggtctgcaaataaaagtcaataaagtccttgattttgcgtctaaaggactgaacgtcctcgctccgtccctcagagtggattccggcttatcacctgatatggcaacgaggaatgcggatatgattgaagcggatcaaaacgattctttatatgtcacgaaggtatccgtaagatggtacagagagcttttaaaaaccattgatgccgctatggtgccgactgatgcgtttttaaaggtgccgcttttgcttatgcagggcggtgatgacaaaatcgtcgataaaatgaaagtccgcaaatggttttccggtgtggcttcccataataaatcgtaccgggaatgggaagggctttatcatgaaatatttaatgaacctgaaagagaaactgtgtttaaggcggcaaaagcctttacagatcagtatatttgaattcgctgggggtgcatatgttgacagtaccggaacatccttttaaccttatggcaaaagtgtatcgggaaatttttccgctcgttcatcaggaattgaacatgtggcgggaaaaatcagattccattaaaaataccgaactgcggcagcaggcggccgcaagtatccgcgataagtcgtttcattgtgaaggaggcggcattttagccctgctttcgggagagcagaaacagaaatgcgtgcaatttatcatcgcgtatcagacaatcagtgattatctggacaatctgtgcgaccgcagcacctcgcttgatccggaggacttccgcatgcttcatctttccatgcgtgacgcgctgacggtcggtgccgaggtgcggccgtactatcagtacagagaggagcgggatgacggcggttatcttcatgaactggtcagaacatgccagcgggtgctcgggtcaatagaacattacggtatcattaaaccttatttgcttgaactgtgtgattattattgcgatcttcaggttcataagcatgtcgttgagcatgaacgggttccgaggcttaaagcctggtttgagcagtacaggtcgcagcttccggaaatggagtggtttgaattctcggcctgcgccggatcgacgttaggcattttctgtctcgttgcttactcattccagcctgattttaacgaacataccgctgagaaaatccgcagcagttattttccgtacatacaaggcctgcatatactgcttgattatttaattgaccaggaagaagatctgcttgaaggcgatctgaatttctgtacgtattatcagtctcatgaagaaatgatgcagagactgcagcattttattgaaaaagcggatgaacatttgcaaggcattccgcatgaaaattttcaccggctgatcaacagggggctgctcggcgtctatttatccgatgacaaagtcgccggccaaaaagaaatgggccgcctcgcgcgaaagctgatcagggcaagcggaaaaacgtcatttttcttttatatcaacggaagagcctaccgcaaatttcagaagatggcttggacgaaaagttcgtaatgggtgaactgcgcctctcgtgtacatcatgacggcgcagttttttatttatgatgtgaagaatgaaacattgtgtgcgcctgcagaatatgatactttaattttatgaaaaaattaaagtatttagcggtcatagcattactttccatttccggaggctgctccgtcacccatgcttccgccggctatcatcctgtcttgatagcgcacaggggctcttctgcgattgagccggaacataccgctttgtcttatgcacgtgcgattaaagacaaagcagattatattgagatagacttacgggagacgaaggacggccgtctgattgcaattcacgataaaacggtagaccggacaacagatggtaaagggatgacagatgatctgtctttggctcagattaagaaactgaatgcgggaaaaggagaaaagattttaacattagaagaaatcatacagaaattcggacaaactgccaattactatattgagacaagagaaagcaacggcagcctggtgatggaaaagaaactgattgacatattacaaaaacataagctgatttccggccataaagcagtcattgagtcttttagcgggaagagcttaaagaaagttcgttctatgaataaaaaagttcctcttgttcgattattaaaagataacgaggctgaggagataaatgataagcagctgcaaaccatcagaacgtatgctgatacagtcgggatcaacgccaaattggcaaatgaagcagtcgtgaagcgcattcatcacaataagatgaaagtgcacgtgttttttgataaggaagacgagcatacgctgacgcctattatgctgaaacaaaaagcagatggtgtctttacgaacaatcccgcttatacacgcagcgtgctgcaaaacagtaaataaaaagagacatgcgcattttacgctgtctctttttttaacggtttcttttttgccgcaaggtgcattgcgaatttgccgatcagcccgatgacaaaaaatgcagcaaaccaccagtaataggttttcgcgaactcaaatcctaaatgtcttgataaaatgatgacaaacatcacatagggaacacttgaaaatatgatgcgaagaatattcaaattgccgctcctcccagatgttacacttaaaagatgaacttttttccattatttcatagtaattgatttttcttgaaaagtaaatacaaaaagaatcggcccgcttatgacaggccgattctttatttgccggcagatttcttttcaatcgctataataaacggcgggtcgttttgctggttgagaaagccgtagctcagcacgcgggctttttcctgatcaagattgctgcagtattccagtaatgcacttttttccgtcttgccttcaggatgcccgtggtacacaacgagaacgatcagcccgttctccttcagcagttcaaggagctgttcgatcgcggaaatggttgagtgaccgtttgtcgtaatgcttttatcgccgcctggcagatagccgagattaaagacggcgcaagccacacgaccgtgcgcatcttcaggcagcgatgcctttatttgatcatggcttttatggtgaagcgtgacgcgcgggccgaagtcggcaccgagccgctccttcgttttagcgagtgcgtccgcttgaatatcaaaggcatggacatgtcctgtctcaccgacaaggccggccagaaaatatgtatcatgtccgttgcccatcgtcgcgtcaaccgtgatatcaccttcctgtgcggcggacttcagcaattctttactgaaagggaggatgtgcatcaaggtcatagggcggtctcctccccggtctttctgaagagctttccttgatagcttccccgtgtttccagctctttttgaatggcgcccagtacttcccacttattgacgctccacatcggcccgaccattaattcgattggcccgtctcccgtaatgcggtgaacgatcatttccgggggaatgatttcgagctgatcacatacaagacttacatattcttcttgagaaaggaactccagctttcctttttcatattgcttcaccatcggtgtgccttttaataagtgaagcaggtgaattttaatgccttgcacatccaaatcagcgacggctttggccgtctccatcatcatgtccctgttttcaagcggaagcccgttaatgatatgggaacaaacgcggatgccgtgttttctcagtttattgacaccctcaacatagcagtcaaaatcatgggcgcggttgatcaggagtgcggtccgttcatgcacggtctgcagcccgagttcaacccacaaataggtccgctcattcagttctgccaaatattccacgacatcgtccggcaggcagtccggacgggtcgcgatagacatgccgacaacgccgtcaagcttgaggacggattcaaatttttcacgcagctcctctaccggggcatgcgtattcgtgaacgcctggaaatatgcgatatatttaccgtctttccacttttcgtgcatacggtttttgatatcgtgaaattgcgtgagtaagtcatcggcccggttgccggcaaaatcgccggagcccgccgcgctgcagaatgtgcagccgccgtgtgcaaccgtgccgtcccgattcgggcagtcaaaaccgccgtcaagcgcgactttaaacactttatgcccgaaatgctcccgcagatgataatttaatgtatggtaccgtttttccgtatttgaataaggaaaagggttattctcgttcaatgttcaaaaagcctccctcacatcagatgcatcctaaaattgtagcatgaatgatggggcggaacaatgaaacaattatggaacggtcaaggcgtaatatctacctggtttttctgttgttgttttaatcgttttggagaaatatcactgaacaatgcaaaaataattcctaaaataagaattacactgcctactttgaatgtattattaaaactgtcacttattttttcattatataaatttgaaatttttttctggatagcgataacttccttcttttgagtattgaaacttttttgtaccttttctttatatggatccggggttatagaaagaatttcttcctcttttttgtttaattcagcaatactttttcttcgatcgaaacctttactgtctgaatgctttaagtgagttattatctcgttttttgcatttttatcaaaaacctgattgttttccacaattgttatggcttctttttttgcagaagctgtgtgatcatttatattcattgtaagcacagatgtaagtatggcaatgcctagcgcttgtccaactgtccgcatcatattaagaatacctgaggcaatacctactttctcaggaggaataagccgtatccctgaactcattgccggtcctatcacaagccctaaagctaagccggtcaaacataacagaataactaccgttgttacagaactgtcgtatcgtatgtatccatataaatatgttgtgattgttaaaccgagcatacctagacccgaaagccaaatgcccccgagtttatcagatagctttccagaaagtacagaggtaaacatagatgatagagctaatgtagaaacaattaaccccgcttctaattcagtttttcccattaaattcgtgaggagtaaagtaataataagggtaccgcttgttaatccaaggccctgcataaagagggtgaaagaactgaaactaaacgtacgtatcttcagcatggataagggaatcatcgggtttttaattttagattcaataaagaaaaacaaacagaataataatacagagattacaaaaagagagataattaatggtgatgaccagcctaaatcagatacttttgcaaagccaaaggttaaacagaagagagctccggataaaataagaatccccatgtaatcaatttttttactcactgtttcatcataactctcagtaataaaaaatgctgctaaaaaaagagaaatcaggcctaaaggaatatttatgaagaagatagcttgccaattaaaattttcagttaataatcctccaagtacaggtcctaaagtagctgctaatcctgagaaagccccccagattccaatgatcaatccttttttattttgaggaacgatggccaaagcaataggcattgtaactggcacaatgaaagcagcagataatccctgaatcactctaattgtgataagcatttcaattgaagtgctcaaacaggcaataactgatgtcaaaataaaaagtgctaatccaaacataaaagctttttttcttccaaaatggtctgccagctttgatgcacctactaataaaactgcaaaagctaaagtataacctgtagccacccaagctacttgagaaaggttgctcgaaaagtaatccagcatcttaggtaatgcaatatttactatagtggtgtccattaccgaaatgaatgtacctaataataatgcagataacataattaattttttgaaattcaaaactacaacctccatcagatattaatctaaattaaaattcgatatatatctaaaaacatgataaatgcaatcttaagaggtgtcaatattattcataaattgttttttcatccacttatctcgaaatcatatttttataattcaacaattttgtaacttgaaataactcaataagagcttaaatggacctgtaaactagctgagatgattaaggatttctgaagagtatgacatgaggagaatacttagcatgaggtgaagcaagtctaataaatctaggactgctcatgataatgctcagtcaggtaagtgctaattagaaatgaatattctttgaaagtttccttttgattgataatattaaaaatgtaaaatgtctggcatgaagatagtacaacgttttcctttgtggaaaaagactttatggggtgtgaaaaagtgcggttaataataaatgacagtgtttcagaattctttgacaagatatcctctattctattcttaaaacacgaggaattcttcaaagattatacaaccaaattgggtttgaatttagataatgaatattttgtattattagatgatcttaaaagaataaaagagttagatagtgagtttttaaatttttattttggcagcttttgcgactacaaagatgttaggaatgcaaatattttttgtttagccacaacattttttaaaataccacaaatttacacgaaagatttttttgaaattattgattatttgtctgcagttacagaagaagagataagaaaaaatattttagagtctctaatttatttacaaggagatcttaaaaccgaaacatctacccaacagtatttaaatgatagggaaagtttatttgagctacttaataatctaaatataaagcccgaatacaagtggatcatatttaaggtaatgaaatctcctaaaacttatgtagatcaattttgcaataaattaatgttggtgaatggttatcttaacgaggcgatttataatttaattaaattcagagatgagtggatgaatcaattaaaaaacataaatatagattttccaaaaaagataatcagtacgttaaaaggtaaggaatacttatcttgtaattatattaatatatatccaacacttttaccttgcactgcaactattacgaaaagtgaagataacatttatgttggactgggttataaagttgataaaatatttgaaaatacattagagaaagcagagattaatcatatcattgattttttgaagcttttatcggataaaagtaagttcaagatattaatcttacttagtcataaaaaaatgtatgctaatgagattgctgaacagctaaatttaaccaacgcaacgatttcacatcatatgagaattttgacattgcaaggtttagttgagagtacgagaaatcaaaataaaacatactattatcttaattcttcaaaattcgattcacttttgaacggtttgttgaaaaaatttaaagctgttccagtcttagatggggatgagtaagttttatagttggtgttagtttcgggatgataattaaagctaataaaaacagatctaaaaaatttgatgaatcccgggtgttttacacaaaaaagataatttaatggtgaacaatttaaagcgaaccgaagatcttgtgggtgatgtggaaaaattatgatgtttttaataaaagaagaattaagttatcgttctaaaatgaaggatttttataaagacttcattctgtcttgattaagttttacatttaatcgtattttatgccatctctgtcttgtgaatgaattacctgatatttcttgtgagaattaatttggaataagaaatactattgatatgacattatcaataggaggactgtttaatggcaacaagacaatcagtagatgaacatctccaaagaagcgaacaggcatatgaatttgcgaatgagcaatttatgaccgcttcaaaacaagagcattataatgataatgagtacagtgaagcgcaaatgatgcttgaaaacgcggtgaatgaattaaacaagctgtcattatctgcgaatgatcagcaaagagagcagctttaccgaatgagattgcagctgcagaccttgcaaaacaacatgattttgcagcgtaattttgattactgaccgcgccgtttcaaatggttcagcaaacctgccggaatcccggcgggtttttttgtatttttttaaaaaaagaattgacaataggcctgagtgtgtttattgtattacgtgtactacttgatgtaatacacataaaacactcgaaaaatgaatcgacatataaatgttaagcatagggaaggggaactttcatgaaaaacaaaagatccgtaaaacaagatgtgcctcttattatcgccgcttcggttttggccagcagtctgtttgtcgttcttgtcgtcatcggttttcaatggcagaacatttaaagaaagagagcagctcgtaaaagaaagaagggaagtaaatgattcaaatcgatccgagaagctcaactccgatttatgagcagatcatacagcaattgaaagagctttgtttaaaagggatcatgaagccgggggataaacttccttctgtcagggaattggcaacgatcattatcgccaatccgaacacagtcagcaaagcgtacaaggagctcgaacgcgatggtgtcattgaaacgctgaggggaagaggaacgtatatatcggagaatgcaaaaacgacattggttgaagggaagatgacgatgataaaagagcaattgaaacagctcatcatcgatgcccattacgcgggagttgagctggagaagctgcaggaatggataaaggaaatcagcgctgatgtgaaaggaggaaaggatcatgattgaattgcggaatctctcaaaaacgatagacggtaaagaagtgctcaaggatatttcgctcaccatcggaaaaggggaaattttcgggctgctcgggcggaacggatcagggaaaacaacactgctccggctcattcagcagattctgcttccggatcaagggacggttttatttaatcaggtggaaataaagcgtcatccgaaagtcaaacagaacattatttatatgcctgttgaaaatcctttttatgacaagtatacatataaacagcttgttgcgattgtaagcagaatctatccgaattttgatgtgacttacgccaatgagctgatgaacaggtacggcattccggaaacgaagaaataccgtgaattatccacaggcctgaaaaaacagcttgcgctcgtccttgcctttgcttcacgcccggctcttatccttttggatgaaccgacggacggaattgacgccgtaacgcgtcatgacgtgctgcagcttatggtggatgaagtagctgaacgggaaacgagcattctgattacctcacaccgtttagaagatattgagcgaatgtgcaaccggatcgggtttttggaaggaaatcagctgacgaatgtgatggacttggatgatatgaaggaagagtacatgaaaatccaaatggcatttgaagaggacgtcgccttgaagatcagagaacaaaatataccgattctcgaccatgccggtgtgttttatacggtgctgattcaaaagaacgatgagaagaaaaagaactttctgcaagagctgcagccgaaagtatggaacgaacttcctgtgaacttagaagaagttttcatcgcgaagtttggaggggaccggagatggtagacaggggattgctgtacagggaatgggtgcagaatcgaactgttcttgtgatggtcggcatttttttagcggcggtcaatccatttgaagtgttaaatacctatctggtttatcaaggctgtctggacacccacgaagcatattgtaagttttatgtgaattctttggatagcggaatgctgaacttaaactgggcgcccgctgtgattttggcggtttgcttattcggactggaacgtacgaaaggaacgattgatgcgcttttcagtctgccttattcccgcgctcaggtgtttcacactaaattttggctcggagcggcggtcattaccggcgctcaggtgatcggctacgggctggctgagctgctcattcttctgttaaagcctgagcgcgtatatttcttccaccattacagcgtcggagagattattgtgagtgttttggcttttacattggtcgcgagcgcaggctgcttaacggggaatacgttcgcccagctgttaacggcgtttgccgtgtcgatagcgccttacctgattattacgttgccgctgacaaatgcggaagttatcttcagggtcggcatgcatgagctgatgccatcagtcaatgcttacctaaacgattcgtttcaatatctgattccgatcatgtatgttaatacggactgggtatctgccagcaagtatatattaatcattccggcagtgatgagcattgtattttatgccatcgggtacttttgctatgtcaggcagccggtggaacggaacggccgtttttttctttggagacagcttgaccggcccattcagattgtggtgatcatcatcgccgttctcggttttggcctggcggggtactcgacgggacatacgatgacagggtatgtggccgggatgctggtcggaggagcgatcggatttttggtcagttattttgtgatttataaaaaaacgaagcatgtgtaagagaggaggaccggaatgataccgcggggattgttgtacacagaatggaaaaaaaatcagtggttgtttttatgcagcggcattcttttaatggcggcaaacccttttatggtttataacaactactcaacatatcaagaatgtttgaataacccagctcttcaagattgtgaattcgttgtcaattatacgaatgggtcgcctctttccttcagctgggttgtgagtgtcatcattgctgtcttcttattaggcttggaacggacaaagggaacgatggatgctttgttaagcatgccttacagcagaggccaaatctttcagacgaaattctggctcggcggggcagtcattgttgctcctcaggcgataggctatggagcggcgtcattgctgatatctttgttgaaaccgagccatacgtacgattttgatcatttttcaatcggaatgattgtcatcagctttatggcttacgccttgttaatggcatccggagcaataacgggacatatattcgcccagctgttaacggcgtttacagtaacggttctgccctttttactcatcggtctgccggccgcgaatttggaggtcgttttcgattttagtgtcggagatcaattttcttttatcagcagttatatcgaatcccgtctttttatatttataacccctattggatatgtgtttaacgactggatcagagaaagagatttgattttaatcattccgattgtgatgagccttgtcttttatctgatcggttacgtcagctttctgaaacatccgaatgaacggaacggcagattctttctttggagaaaattggaccggccggtgcagatcttggtgattgcgtttgccgttatgggtttcggcgttttcggatatggggtcacagacacgatgttcggctatttagccggcattatcttcggcgcggttatcgggtttttcatcagttattttacggtttacagacagtcaaagcatatgtagatccgtttgaaaatgagcagtttggaggaaggcaaggtgccgattagcggtttgctttataaagaatgtaagcagcggcagacgctgctgctgcttacagcggggttcttatctatcttaggccctttggcaattataaatgagtattttcactataaggattgtttacgtgcacttcagctgtacccggggtcagtttgtacattcagcatcgattacagcaattatcggaatttgattgggcttcatttcattccgccggttgttatggggctttttctgataagagcaggccgggctgaaaggatgtttacactgagtcttccgtattcgagaagccggatatttcatacgaagtttttcttgggagcagccgtgttagccggctcgcagtttgtttcttacggagtatccgacatattgttcctagcgcttaaacctgacgctgtccatcattttcaatcattcagcgcagggatgctggtcatcagcttgatgatttacgcattagtgacagctgccggcacgataacgggcaatttagcggcgcagctgatcacagcgttcacggtttccgtctttccgatcgtggttatgacgatttatctgttaaacgccgagttcctttttggcaggcaggctgtgccggatattgatttcccttggagcggatttctgatctatttcatgcctgccgcttacatccatacatcatggatgtattacatgaaacacgcattgttcatctccgcattaatgggattttgtttctatctattcggctatgtgaatttcctgaaaatgccgaatgaacgaagcggacattttatcctgagcaaacacattgaacgcatcattcaagtgctcgtcatgtcgctcagtatgctgggaagtgcgggggtatgcggatatgcttataacggttcgtataccggttacatattcggcatgctcatcggtgcgattatcgggtttttcatcagttattacttcatctataaaaaaacgaaacagatataagggggagtggtgtacgtgatagaggtacagcatatcgatcattcatttaaaatcggcaggaaaggcagagagagtgaggttccggtactgaaggatgtctctttgaccgttgaaaaaggggaaattgcctgtatcgtcgggcggagcggttccggaaaatcaacgcttctgaatttaatttcgggatacatagcgccgacaaagggccgtatcgtcattaacggcactgatgtgacgggtttcaatgaaaaagagtgggcgcagttccgcctcgggcatttcggctttatttttcaaagctttcagctcatcccgagtctgacaacctatgaaaatgttgaaatgccgcttgccttaaaaggtgtcaaaccgtctgaacgcaagcagaaagtcgcggatatgctgaaacgggtcggacttgaaaatcatgcgaatcattatccgaatgagctgtcaggcggccagcagcagcgtgtcagtatcgcaagagccctcattttaaatccgtcaattattttagccgatgagccgacgggaagcctcgattcagaaacggaacttgaggtgcttgcattaattcagcagctgaaccgggagcgcgggattacatttgtcatcattacgcatgacgatgaagtcgcttcgatcgcgcattcaaaattccagctgcatgacggtgtattaaaagggggcgttactgttgagatttaaggatcagattcactttatcagaagaaatatgaagaaaaaccggctgcgtgttttcatgacggtgctggcgacgacaatggcgtgcgcgtttttagtggtgctggcttccgtcggattcggcatccaaaaaacgattacagacattacgatgagccagcagattgttacggaaatcaatgtgctcggccaagagaacggaaaagccgtgaagaaatcagacttggaaaagtataaaaatgtcaagtctgtcgttgagagaacacaagtgtatgaaccgaacaaagcgtcattgggaaaccgaacaaatgaagattcagccattgtgctgacaaacatgaaagatgaagtcaaagccaatatggagcttgatcagggaagagtcgcccgtacagagaatgaaatcgtggtcggctatgattttgcgaagaacctattgacgaaaaaagaggctgacgcttacgacaaagagttaaaggatcaccaaggcgacatgtcggaggtgaaaaaaccaaaaggctatacgaaagacctgcttaataaaacgatacagctgagcatctccaaaacaaacaaagacggagacgttgaaaaaacgaaaacgtacgacttcaaagtagtcggaattacaaaaaaaccgtcccaagattggatggaggatacaaatatttttgtgagtgatcaattcaagaaagacttctcgacattcttggatctgaagaatggaaatgcggaaaaaagcatcaatgtgtatgcggacaaattcgatcatgtcgatcagcttacccatgacctcacggatgacggcttttatgtcagatctgtcacaaccgagctgaagggcgtcaacacctttttcctcgtctttaaaatcggtctgatctttgtcggctttatcgccgtcgtgatttcagccatcggtattttcaatacgatgacgatggcggtgacggaacgaacgcaggaaatcgggattatgaaagcgatcggcgcaagcccgtccatcatccgcagaatgttcctgatggaaagcgcctatatcgggatattaggttctgtcatcgggattatcatttcttacggagtgagttttgccgtcaatctggctgtgccggttattttgaaagcggtagggggaaataccggagctgaagatcttcattataccttctcctacatcccgctcagcctcgttgtgatcgcagttgtcatttgtgcgggggtcgcggtgatttccggtatgaatccggcccgcaaagcgacaaaaaccaacgttctgaccgcattaagaagagaactgtaaaggaaaaaagccggctggacatcagccggtttttcctctatctatcagaaaagggcggataccatgtttcacattttgttaatagaagatgataacactttgtttcacgagatgaaggagagattaacgggctggtcatttgcggtgcacggaataaaggatttcagccgggtcatccgggagtttactgaaattaagcctgatttggtgatcattgatgtacagctgccgaaatttgacggctttcattggtgcagaatgatacgctcccaatcaaacgtgccgattctctttttgtcctcgcgcgatcatcccgcggatatggtcatgtcgatgcagctcggggcagatgattttattcagaagccttttcactttgatgtgttaatcgcgaaaatacaggcggtgttccgccgtgtgcaccaatacggcacagaaccggcgctgatgaaaagatggtgcggggcggtcattgacacagaaaccaacacggtcagctgtaaaaacggttcggtcgaactgaccaaaaacgaaatgctgatcttaaaactgctggctgagcagaaaaataaaatcgtcagccgggaagaactcatcagaagcctatggaatgatgagcgtttcgtcagtgataatacgctgacggtgaatgtcaaccggctgcggaaaaaactcgatcaattaggcatcgggaaaatgattgaaaccaaggtggggcagggatacatcgcaaaggaagaagacggtctttatgattaaatcatttctgctcgaaagaaaaagctggatcgcgatgtttcttttgcagcaggctgtgctcctttttgcggcatatattgatgcgtctattccgtttttttcggtgctgtattttgtttacctgtcgcttcttgtgtttcttgtatttctcttgttccgctatcgtaaagagaccgcctattataaaagcttaagagagtgggacgccaatttagacatgtcttatcttaaagcgcctgacagtccgtttgagtctatcgttgaagaaagcattgaagggcagacagagcaattacgaaaaagctcacttgatcttcaggcggcgtcagagcatgaaaaggatgatctgatgtcatggattcacgaggtcaaaacaccgctgacagcgatgcatctcatgatcgagcgccttgatgaacagccgctgaaagcccctttgctgtatgaatggctgcggattcaccatctcctggaccagcagcttcatcagaaacgattgtcctttattgaaaatgatttatcattccagcgcattcagctcagaccgctcgttttcaaagaaattaaaaacctgcaatcatggtgcatacaaaaagggatcgggtttgacattcagcttgattcaccggacgttcacagtgacggaaaatggctttccttcatcatcaggcagctgttaagcaatgccgtcaaatacagtgaagcggatgacattaccgtaaaaagctatgaacaaaacggccgggtgcatgtcgatatcgaagaccgcggcatcggcatcgagcccaaagatcttccgcgcatttttgaaaaaggatttacctcgacgcgaatgaggcgagatcacgcgtcaacggggatgggcctgtatttggctcgaaaagccgcggctccgcttctcatccagatcagcgtgcgctctgagccggaaagcggcacgatttttaccttggtgtttccaaaacagaacgatgccgtcagcatgttcagcgtgtgacaaaagtgtcacatgcttttctcttttgttcgcttaatcaaacgaaaaaaacggcttctgtttttaaaataaagataaccaatgtaaaaggagaatcataacgtgatgattttagaagcaggcaatatccaaaaaagctacggaaacaagctgaataaacaagaggtgctgaaaggaattgatcttcagattcacaaaggggaattcgtcagcattatgggcccgtcaggatcagggaaaacgacccttttgaatgtgctttcctccattgataaagtgagctcgggcaccattaaactgaacgagacggagattacatccatgaaagaaaaacagcttgccgaattcagaaaacggcatctcggctttatttttcaggattataatttattggacacgctgaccgtgaaggaaaacatactcctgccgttatccattacgaaaatgtctaagaaagaggcggacctgcgatttgccgagacggcagaggagcttgggatctatgatttgagacataagtatccgagtgaaatttccggcggacaaaaacagcggacgtctgccgcaagagctgttattcacgagccgggcattatttttgctgatgagccgaccggagcgctcgattcaaaggctgccacggatttattgaataaactcagccgcctgaatcaaaaacgccgcgccaccattgtgatggtgacgcatgatccggttgccgccagctattccggacgtgtggttttcattaaagacggccgtgtgtatacgcagctgaataaaggcggtcaggacagaccggacttttttcaggatattatgaaaacgcaaagtgtattgggcggggttcaggcatgagtattcatcatttgatcttccagaacctgaaaaagaatatgaaaaactattatctttacgtttttgcgctggtgttcagcgccgccctttatttcgcgtttgtcacgatgcaatacgatccggcgcttgatgaaatgaaaagctccataaaaggagcggcggcaatccgggccgcctctgtactgcttgtggcgatcgtgtcggtatttcttttatatgccaacaccatttttattaaacggcgcggccgggaaatcggcttattccgattaatcgggatgacgaaaatgcacattttccgcatactcagcgcagaaaatttcattttgtatttcggatcgatttggatcggtattttcgccggcttttccctctcgaaattatgtatgatgatgctgtttcatacagtcggtgtgaaagcctctgtctcactgtttttttcaagcaaggcgctcgttcagacgttaattgtgttcggggcaatttacgtgctgattatgatgatgaattacttatttattaaacggcaaagcattttgtctttatttaaaaccgcgtcatcgtcagaaagcggcataagacggctttcttgggtgcagatgttgatcggcgttgtcggtattgcggccattatcgccggctatgccgtgtccgcggatttattcggaggcagttttacgagcatgaatgaactgttttcggccatggtgtttattctcggctcggtcattatcggaacctatctgttttataaaggttcggtcagctttctggcaaatctcatccggaaatcaaaaggcgggtatctgaatgtcagtgaagtgctgtctttgtcatccatcatgttccggatgaagtcaaacgccgtattgctgacgattattacgactctttcggcgctggcaatcggtttgctgtctttaagctatatctcgtactactccgcggaaaaatcggctgagcaaaatacagccgcggactttgcgtttgataaccaaaaggagactgactcttttaccgctttattgaagaaaaacggaattgaacacaaagtaaaaacaatcaagaccattcaagccggtgtcaatatgaagaacattataaacggcgacatgaaaagctttcaacaagacccgtccagcctggcgctgccgattataagcgagaaagacgcagaagggacggagctttctgacggagaagccgtgtttaccggatataatgatatgatgaaaagatttctcgacctgaaaacgtcgggttccattgatataaacggcaaaacggataaaataccgctggcgtataagggcttgaagaacgacttcctcctgtcatatacatttacaagcggagggctgccgaccgttatcgtcacgcagcaggtattcgaccggatcgagaaagatatcgacccgtccatccagggaaaatcaaatcggtttttcggcattacactcaaacgagaagaggacatccaaaaagctgatggtctgtttcaggcgcagcactattcagacggtgcgctttcacaatttgaaacggctgacacgcaaaagaaaaacatggggctgatcatgtttattgtcgggtttttaggattaacctttctgatcacctcaggctgtatcctttattttaaacaaatgggcgagtgtgaggatgagaaggctgattatacgatattgcggaagctcggcttcacaacgggagatctgctgaaaggcatccgccggaagcaggcgtatcatttcggcattccgctcgttctcgggctgttccacagctattttgccgttcagtcaggatggtttttattcggaacggaagtgtggacgccgatgatcatcgtcatggcgctgtatacgctgctgtactccatcttcggcatgctgtcggtgctgtattataaaaaggtcattcaatccgccttgtaaaacaagttgaggagcctccgcataagcggaggctttttttgtatgaatagaagaaagcgatttttaaaagaatagacatacgtcattttttcgcgcgggggagccttatgcagaagtattttcaattgaaatctgaaacaggggcctttcatcttttttccaaggaacacattttcacattgttgatcatcgggttgctgggggcgggcgtgatcgtattccggaaaaagctcaaccagagccgcatgatccgctatgtactattcattctccttgccgtgtcgcagatcagctatcatatatggctgctttgtcatcatgcctggtcgctgaaaacagctctgccgctgcagctgagcgacctttccgtctatttggcgatgctgatggtcatgacaaaaagcaaaaagctattcgccttcctctattttgccggtttgggcagcgccgtacaggcgatggcaacacctgatttaggggcgtattctttcccgcattttcggtacatcgtgtttttcgtctcccacggctgtgtttttcttacctgtctattcatggccgcttcagaaaggtacaggccgtcggcgcgcgggctgtgggtgtcggtgctgatcgtaaatctgtacggggcgtgtgtcttttttattgatcgtgtgctgaatgcaaattatctatatttaatgaaaaaaccgaagaccgcttcgcttctgaatgttttcggaccttggccgtggtatcttctatcaatggaagcggcggtgatattgagcttcttcattctgtatattccgttttggctgctgaggaaaagagcatgaagccgggctgtttttgcgaatccaatcatttgtaattttttcaacattccggcattatttttttcagattctgatgttgaaaaaagacgtccgcggcgatagaatgaatgtgctatgataacgtgatcgatacggagccgcggcttgcggtttccgttttttcatggggttttttatagagagagggggatcggtatgccgcgcgctttgaagatattaatcatcggaatgtttatcaatgtgacgggcgcatcttttttgtggccgctgaatacgatctatattcataatcatttagggaaatcgctgactgttgcggggattgttctgatgctgaattccggggccagtgtggcggggaatttatgcggcggatttttgtttgataaaatcggcggattcaaatccattatgctgggcattatgatcacattggcaagtcttctcggactcgttctgtttcaccaatggcccgtttatatttggctgctcatcattgtcggcttcggttccggtatcgtgtttccggccagttacgccatggcgggagcggtatggaaagaaggcgggcggagagcttttaatgcgatttatgtagctcagaacgcaggtgtcgccgtgggctcggcactcggcgggatggttgcggcgtactcgtttacgtacgtgtttttagccaatgctttgctgtatgtgctgtttttccttatcgtatttttcgggtttcgaaatatcaaaaccggaaatgcgagccaggtttctgttctggactacgagcctgtcagcagcagaacgaaatttacggcgcttctcatattgagcggcgggtatgttctcgggtggattgcctattcgcagtggtccacaaccgttgcgtcacatactcaaagcatcggtatgccgctttcattatacagtgtgctctggaccgtaaacggaatattaattgtcgccggacagcctctcataggagctgttctgaaaaaatggtcaggcgcgttaaaaacgcagatggtcatcggcttttgtatttttatcgtttcgttcggcgtgcttcttagcgccaagcaatttccgatgtacctcaccgcaatggtgattttaaccgtcggagaaatgcttgtctggcctgccgttcctaccattgccaatcagcttgcgcctaaggggaaagaagggttttaccaaggattcgtcaacagtgcggcgacgggcggcagaatgatcgggccgctccttggcggcgtgctggttgatcagtacggcatgagcgtgctgctgttgatcctgatggtgcttcttgttgtcagcatcgcagcgacggtgctgtacgacaaacgcctgaaaaccgttaataaacaaaacatccaagtgcgatgacgacataaaaaatcccgccgaaacagcgggatttttttgtttatacgaccggaagcacgttgacggcgtccttaacgtttaaatacgtctttaatgaagaaaagctggcatcaagctgattcattctcatggcgagggaaggcttgatcccggtgataatcagttctgtgccgattaatttaagcaggtggtgcaatttgaaaatctggtctgccgtctgttcgtttacctcggccaaacctgataagtctataattaagtaatcatctttagatgcggttaatatgtccgtcaaagttgtcacaattgaatcaaatcgttcttccgttaagtttcccactaacggcaaggcggagatgccgtttcggatcggaacaatcggtgttgacagcgtcgtgatttctgtgagggaatcctccaggagcttttcgtattctttctgctctgtaatgtctttttgaaaaccgacaaaatagagcttgtcttcaacatacagaggatcaatgttgagttcattccaaaacggggtgccgtcttttttgacatttttcagccgcaccgtgatcttttctttctggtttaagctctttcttattttcgcgacttgttgacggtcggtttctttgctttgcagaaatctgcagttcttacctaatatctcttcggaagcgtagcctgtcatatccataaatccctgatttgtatatatgatgggattgtcctcaagagaggggtctgtaatcaccacgccgatgcgtgcgtgatcaagcgcctttttgataagctccagctgctccagttttccggatacatttgagtcagccatgtaaaacccccttttggccgtaaagctgcgcgcttttttcagccgttgtttctcccctttttaaatgaatctacagtaaccgtagcataacatatgttctgattcaagcagccgaagtttgcaatttgtcattcgggcttgtcctcatatacactgaatatataaggggaaggcacatcatcgctaagtaagtgactaggtcattgtcactgggtgaaaaatgaatctaatgcatcaagcttaccgatcatgtgttcacatataatggaagaaacaagctttttactttcctgctcaatcgccggtatgtagatatcgaaaatcatcgtattcgtaagggggctggatggcctgaagtcgctttactaaataagggctttaggaaggtgatgaagatgctgcatcaggtaataattgcttgtgtaattggaggcatcatgggggttctcggtcatgtgaaaaagagaggcaggctggagaaacccagaatgacaaagcggtttatctatctcggttttttggaagatggttttatcggaatggctgcttccatcttacttgtcttatccgctgaccccgattcaggaattcaactcgtcatcttatccataatcgcaggctacggcggagaagctgttctcaggagctttgattttgtcagagaacaaaacagtgattcggccgaagcaaaaccacaccagcaaaaaaatcctccatcaaaataatatccccgctcacgacccgttccgggtacattcccattgtatacaaacctgcttgcacttatgaacagaattctataaaatacaggtaagattacggtagcgataagaacagtgaagaggagcagtaagaagcagatttcgcactcagagaattgacggccggtgcaagtcaatcaagtctgtttccgaactcgcctcagagttgcagcggcaaaaccgctgacgcataactgcgttaaaagtatcaagtgagtgcggcttaaaaccgcgctaacgagggtggtaccgcgggaaacaaaaatctctcgtcccttttagggatgagggagttttttttagttttagaataatctgaatataatcttcctcatcccgtcaatacttggactacatacgccgtattcaatcagaaggaggtttttacgttgagttttcagcacgaaaaaatagaaaagaaatggcagaattactggttggatcataaaacgttcgccgtcagtgaagagaatgacaagccgaagttttacgcgcttgacatgtttccgtatccttcaggagccggccttcatgtcggacatccggaaggctatacggcaaccgatatcctttctcgcatgagacgcatgcaagggtacaatgtgcttcatccgatgggatgggacgcgttcgggcttcctgccgagcaatacgcgcttgacacgggaaatgatccggctgagttcacaaaacaaaatatagataatttccgccgccagatccaatcactcggattttcttatgattgggatcgtgaaatcaatacgactgatccggactattacaagtggacgcagtggatcttcaccaagctgtacgaaaaagggctcgcatacgtagacgaagtgccggtcaactggtgcccggcgctcggaacggtgcttgcgaacgaagaagtcattgacggcaaaagcgagcggggcggccatccggttgaacgccgcccgatgagacaatggatgctgaaaatcaccgcttatgcggacaggcttcttgaagatttagaagaacttgactggccggaaagcattaaagacatgcaacgcaactggatcggacgctcagaaggcgcaaacgtgcatttcgcgatcgacggcactgatgacacgtttacggtgtttacgacaagaccggacacgctgttcggcgcggcttatgccgtactggctcctgagcatgagcttgtggaggccatcacgacgcctgaacaaaaagaagcggtagacgcttatgttaaagaagttcaggcgaaaagtgacctggaacggacggatcttgcgaaaacaaaaacgggcgtcttcacaggtgcatatgccgtaaaccctgcaaacggggaaaagctgccgatctggatagcggattatgtcctcgcctcttacggaacgggcgctgtaatggccgtgccggcgcatgacgaacgtgattttgaattcgccaaagtgttcagcctgcctgtcaaagaagtcgtaaaaggcggaaacacggaagaagaagcgtacacgggagacggagaacatgtcaattccggctttctgaacggactgaataaagcggaagcgattgaaaaaatgatcgcctggcttgaagaaacgaaaaacggtgagaagaaagtgacataccgtctgcgtgactggctgttcagccgccagcgctattggggcgagccgattccggtcattcattgggaagacggtacgtcaacagccgttccggcggaagagctgccgctgattctgccgaaaaccgatgagatcaaaccgagcggaacaggtgaatcaccgcttgccaacattaaagagtgggtggaagtcactgatcctgaaacgggtagaaaaggcagaagagaaacgaacacgatgccgcaatgggcgggaagctgctggtatttcctccgctttatcgacccgaaaaatccggatcagctcgcttcacctgagaaactggataaatggctgcccgttgatatttacatcggaggggcggagcatgccgtgcttcaccttctgtacgctcgtttctggcataaattcctctatgatatcggtgtcgtgccgacgaaagaaccgttccaaaagctgtataaccaagggatgattctcggggaaaacaatgaaaaaatgagtaaatcccgcggaaacgtcgtcaatccggatgaaattgtggcgtctcacggagcagatacgcttcgcctgtacgaaatgtttatggggccgcttgacgcatctatcgcctggtctgaatcaggccttgacggagcacgccgcttccttgaccgcgtatggcgtttgtttatcgaggaaaacggcgagctgacgggcaaagtgacagaaggcgcgggcgaaactcttgagcgcgtctatcatgaaacggtcatgaaagtgacagaaaacttcgaagcccttcgttttaacacgggcatttctcagctgatggtgttcattaatgaagcttacaaagcgaatgaactgccgagagaatatatcgaaggttttgtgaagctgctttctcctgttgcgccgcatttggcggaagaactgtgggaaaaactcggccacgaaggttcgattgcatacgaggcttggcctgcttatgacgaatcaaaactggtggacgatgaagtggaaatcgtcgtccagctgaacggaaaagtaaaagcgaaattaatggttccggctgatgctgataaagcagcgttagaacagctcgcacaagctgacgaaaaagtaaaagagcagcttgaaggaaaaacgatccgaaaaattattgccgtaccgggcaagcttgtcaatatcgtggcaaactgaccggacgaagcccctctcctacagagaggggcttttttatcaggcctctatcatagaaattgcaccgcgggctttggtatacttaacaccataaagatgaatgggagtgtcacacattgaaaataaatgaaatcagcacagccgcactggaagaaaaattaaaagcgggagaagagctgtatctgattgatgtcagagaagacgaagaagttgccgaaggaatgattccggaggccgttcatatccgcatgggggacatccctgagaagatggatgcgttagacaaggacaaggaatatgtatttatctgccgttccggaaaaagaagcatgaacgtttgtatgtatttacatgagcagggcttccgtacagttaatgttgaaggcggcatgctggagtgggaaggcgaaacaaagccgaagaaataacgctttgaagtgaaagaagaaaagggacgtgcgtctttttcttctttttttataaaaaaaacgggaggcgaatcaggtgaaaccgatgatccgcgcgatgaaaacaaacgatatcaaacaggtccggcaagtcgcagaacgcagctggcatcatacgtatgaagggattattcccagacacattcaggatcagtttctcgaatccgcctatcaggatgagatgatggaacgccggctcttgcattctttgttctttgtggcggaagaagaggggcgagtgctcggttttgcaaatgccaccccggttcaaaaagacggaaatgcggagctgaccgccatctatattgatccggattgccagggaagcgggataggcacggcacttcttaaagaatgcatcaggcagtccggcggggtaaaaaagctttatgtccatgcagaaaaagagaaccgcatcgccttgtccttttatcaagcgaaagggtttcaaagggtatgtgaatttgaagaagattttaaaggacacaccttacagacggtcaaactggtgctgaacatataaaaacgtccggcccgcccgggaccggatcgcgaatgatcagtgataagccggaagccggtctttgtgcgcttcaaataagtcatcgcacaaagagatgatgtcattcatggaaagctcggcgctcgtatgcggatcaagcatggccgcttgatatacggcttccttttttaatgtaacggccgcttcgatggttaaaagctgtgtgttgatgtttgttctgttgagcgccgcgagctgctccggaagttcgccggaatagcacggcataatttggtttttaacggcggcgcacggcacttcaacgaccgctttcgccggcagattcggtatcagcccggtattcagcacattgccgccgaatgtgaacggacggcccgtctccatcgcttctataattctcgaaccgtattctttcgagcgttcatgcgtcaggttttggttgttgatgatcccgtctctcatcgtttcccagtttttgatttgttccgcgcatctcctcggatattcatcaagcggaatttggagttcatctatcagctccggataccggctttttataaaatacgggtgatattcggcattatgctcagatgattccgtcacgtagcagccgaatttatccatcagctcaaaccgcaccatgtccttatgtttcgtcttttgtttttcgcgtgcccgtcttttaatttccggatataaatcaattccgtcttttttaatctccaaaagccaagccatatggttgatgccggcaatgcgttcttccgtaccttcgtgatccatgccgagtgagtcgaacagatctttggtacagacctggacgctgtggcacaggccgaccgttttgacatttgtatgtctgagcatcgctccggtcagagaggccatcggatttgtatagtttaacagccacgcatccgggcagacctcttccatgtcttttgcgatgtcaaataaaacggggatggtgcgaagggaacggaaaatgccgcctattccgacggtatcggcaatcgtctggcggagaccgtaccgcttcgggatgtcaaagtcaatgaccgtcgcgggtttatagcctccgacctgaatggcgtttatcacatagccggcgtgtgtaagcgcttgttttcggtcatcgtaggagatgatggatatactcggattgtagcggtctctcatgttttccagcatgagctgagattctttcagccgtacagcgtcaatatcataaagcgcgaattcaaatccgtttaatgcttcagtcagtaaacagtcccccagtacattttttgcgaaaatcgtgctccccgctccgataaacgtaattttcttcaacagaaattcctcccttttcttctcagcctttgaccgccccggaggacagccctgagataaaatatttttgaagtgccaaaaacaatacgaccatcggcagcatcgccataattgcggctgcggcgactaagtgaagattgttcgcgttttcgccgaagaaccccgccatggccacggtcaatgtctgcaccttttgatcttgtaaaaagaaaatcgcaaattggtaatcgttccagataaacacgcaggaaataatgcagaccgttgcggtaatcggtttcaacaaaggaaacacgattgtataaaaagtcctgatcaatcccgcgccgtccatcctggcggcttcctcaagttctttcggaatggaagagcggataaaccctgaatataagaaaacggtcagcggcatatatgcagccgtattaatgagaatggctgcggcatgcgtattgaccagccccgcatcagcgaccatcttgtataaaggaaccatggaagtcaaaggcgggataatcatgatggaaatcaaaaggccgaagacgattttgttcagctttgtatttcttctagcgagcgggtatgcggcaagcgaacccatgaaaattagcaaggcggcggaaacggctgtaataatgatcgtgttcagaaaggattgcccgagagaggcacgctcccatgcttcacgaaaattctgaaatgaaaaggcggatggcagcgaccattttgaactgtagtctccttttgcttttaatgacgtggtcagcaaaatataaaaggggacaaaatgaacgcacgagataacggcagccaacagcgtaaaaatccgcattcgggctgttttcatgacatttccgtctcctttcgcttgaaatacacgagagccgaaaagctgatgacaagaataataacggacataaacacgccttgggcggcggcatatcccgcatcctgccgtttaaaatataaatcatacataaacgtcgacatcgattgagaggaattgcccggcccgcctgcggtcagagcgaaaatgacatcaaacagcttcagcccgccgatgatattgatgaccatgttgatggtgacagccggcatcaataatggcagggtgatggtgaaaaacggctgaagacctcccgcgccatccatttttgcagcttcataataatctttcggaatgctttgcagccccgccaaatatacaatcatcgcaatgcctgcgtattgatacgtgttaatcatgacgataatccacgggtttgccgcagggcttgccaaggcgttgacaggaccgattcccagtgcgcccagtacatcattcagcgcacccccgtcatatgagaaaataaaataccaaatgtatcccataatcagcggactgataatgacgggcaggtagacgatcgttcttgtgagcgccttcatttttaagctctgattcaaaagcagcgcatataaaagtccgagcatattctgaaaaaaagtgcttccgatgccgtaaagcaaagtgtttttcacaataagccacgtgtccggatctgtaaaaagccttttatattgagtgacccccacccattgatacgtctgtgagaagccgttccagtttgtgaatgtgataaaagcgcctttgacaaacggaaaaatcatgaaaataaaaaccgtggcaagagcgggaacgtacatccaccacagtgacgcgggttttaccggcttttgatgctgaaatccttgggtttctcttgcaagatcactcattctttgtcagctccttgtgaatcagattgaagacggagccgcttatattccctgccgagtttcgccgaaacttccgcgggggttaagatatcggccgtcagctcctgcccggctgtccccatcacatcccacattccgttcggcaaataaaggcggtcaaaataaggctgcaccttaatatgctgatagcgcttatagtcatttgcgtagaaaatgtccgtttgcacattcactaatccggccggaagcgaggtcgcttcggcaattgatttcgcatgctcgggacgggccataaatgcgatgaactgtttcgcttcttcaagccgcggggaatccttgaatgccgccagcgtgtaacgttcgcctccgatccaaaccggcgcgtctcccttgtggacggccggggtcggtatgatgccgacttttaccttcggattgatttgagcgacgtcttggccgagggtgccgccctgcagcgtaaaggcgattttgttttgcgccatcagttcaatgagctgggaccgttttgccgtcacggcatctatattgagcaggctttccttttgcatctctttcagtttgtcagataaataggtgaagtgtgtccagcggaaggttccgtttaacagctgttttttgtaacggtgtgcgggatctgtgatgagaagcggtgcggcgaattgatcgtaatattgggcaaatgagcttttctcatagccggcaaaccagaagggggtgactgttccgccgcttttttctttaatctgtctcagtgccttcataaaatcatccattgtttccggcggtttgattctgtatttttccaacattgtgcggttgtaggccagtccgtcctttgcctgattcagagggaaggcgtatattctgcctttggcgtctttgagcatgctgtttaaattcggatcgagccgcttcgtccaagacatgccgctgaggtcggcggtatattctccgtagcggattttagcccagccgtgtgtgtcgaaaagatcgggcatgtcaccggctgccattctgaccctcatcatattttcgtagtcattgcctgggaaatgaacgtttacttgaatgtccggatgttctttttggaatgaatcagccaactttctgaatacggcgcgttcgctgtctgaggatattgtggaatagactgtcaatgttttctgcttttctccggcgccgctctgttctgccgagcagccgggtagtatcatgcaagtaaaagaaagaaacaaagccagtaagcgtttcatcttttcctcctttaaatatgatataaacgctgcgggacatgtcacctcctttcttgtgagccgcagctttgtctgacaatcaatgaagtggggagcgtcacggccagcgggacggttctgccgtttaaacggtcgagaagcaatttgacacccgtccggcccatctcttccgtgtatacttttaccgttgataacggcgtgctggcgtattctgcctcatcaattccgttgaagctgacaattgccgtatcgcgcgggacttgaaggccggcttcctgcaaggcttttaaagcgccgacagccatcgaatcacttgcgataaaaaaggcatcggggagacttccgcctttgatggcttcattcatcagccggaacccttcgtgcatgctgtattcgccgatcagtacatgctccggcccggctccggccatttgtaagaaagcggtcagacgcttatcctcaatcgttttattgctgtttacaccgtctatgacggtatgctcccgttcccggccgccgatataaccgagccgctggtaaccgagcgacagaagatgttcgatcgccttttgcgctgcggcataaaaatccacgctgacagaatcgtagcgggcgggatcgggggtgccgttaacaaataccgcgtgcctgaaagcggcgctgatattcgtaagcgcctcgtcttgcaggctgccgattacgatcacgccgtccagatcgtgaaacatatgctcttgaaaagacccgagatggatagaagatgtgataaaaactttttgccgaaagcattcttcctcaatgccttttcggatcgctgaaaaataaggatcctgccgttcttcttccggtgacaggcagctgacaacgccgatcaggggggctgaatcgctgcggctgcggttcttccgtttttttgccgacggctgatagcccagctcatcggcgatcctcagaactttttctcttgtttcatcagtcacggccaaagagtcatccttattcaaaattctcgatactgtcgcgctggatacagatgcctgtaaggcaatatctttgagacggaccatttcgtatctcctttttactaaatatttactaaacagaaatgacctggttattgttaaaatgatattatcatatattagtaagcgttttcaataactatttttggttacttttagtaaaaatcagtaaaaaagaaaatctgtttttctctatcatatttcaattgaaccggaataaattgatagagaaaggagagggtgatgtgctgaagatagctgtttttgatgaggagcatgaaaaggatctgcagactgaagtcaatacatttttaaaggggatttctgatgaacagctcgttgatattaaatatacggtagcggcggcctgtgatcctgaaggtgagcagctttattgtttttccgctctcattttataccgaaaataaaaaagcccggatgaaataccgggcttttttatgcattatgcttttttgacgcggggacttctcggtttttggtatttctccgcttgtttgattccttttctttcgctcgctaatgacttgtacagagacacgatcatcagaaggatcacgactgaaaacggaaccgcggcgagaatggccgtgttttgcagtgcggccagaccgccggaatataataatacagctgccacggcggactggatgacgccccagatgattttcacccggtttgacgggtccaaagagccgtaagacgtttgcattccaagcacaaatgtcgctgaatccgctgatgtaataaagaatacagcaatcagaataagcgttaatacggatgtcaccattgtcagcggatagtggctgagtgcgccgaacagcatcgtatccgttgacattcccgcgacattgaatacgcctttctgctgaagatccatcgcggatacaccgaaaatcgcaaaccataagaaagccaatatacaaggtgtcaccaacaccccgattaaaaattcccggatcgtccggccccttgatacacgggcgataaaaatgccgacaaacggcgaccaggatatccaccaggcccaatagaaaatggtccagctgttaatccattcgcgtttttggggatcattcggagacaagcgaaagctcatctgcacgatattttggatgtattggccgatagaatcggtaaatgagttcataatcagcactgtcgggcctgcaatgagcataaagatcattaaaatacccgcgagcgccatgttggtattgcttaagtatttaatccctttgccgattccgctccacgcagaaatcaaaaataacacggtcacgacagcgatcaggatcagctgaatggaaaatgttttcggaatgccgaataaataatgcagaccgccgttgatctgagtcgctccgagccctaagcttgtcgccacaccgacaacggtcgcaaacaccgcgatacagtcaattgctttgccgatcgggccgtttactttatcgcccaaaagcggtgtcagagtgctgctgatcaaaccgggcgcgtcttttctgaattgaaaataagcgatacataaagcgacgaccgcatagatggcccaagcgtgcagtccccagtggaaaaacgtgtaccggagcgcatcacgaaatgcttggggtgtttctgtttcacctgagggagagctgatggcgtaatggctgatcggttccgcagccccgtaaaataccaaaccgattcccatgcccgcgctgaaaagcatggcaaaccatgataataagccgaattccggtttttccccgggttttccgagttttattgtgccgatcggactcacaatgagaaagagacagaaaccgacaaatatagaaacgaccagcagataataccagccgaaagaatccgtaataaatttttgtgccgtatcagtgacttgctgcaggctgtcaggagaaatggccccccataaaaccgcagctgctgtgatgacaatcacaatccaaaaaacactggagatgttcttcttcaaacgttctcaccctctgactatttttttcaatacgccattttttagtatggtcgcacgattgcagatcattcctttcttcctgttccctcaatcaggtgaaacaaaacgcagaaaactgtatcatgtttttggtcaattatcaacggggacgctcaggtaaatgcgctttaaaccatttacagcgagcgtgagaaacgtcctgcattcaaaccggcgagacgccccgtgacaaaggctgaagtgatattgtagcccccggtataaccgtgaatgtcgagtatttctccgcaaaaatataagccttccatttttttagacgccatttgtttcggctcaatctcttttacggaaacacctccgcctgtgacaaacgctttgtccaaagaaagcgttccgtcagcggcaaccgtaaattgtttgcagtctttgacaaaagccctgaattgatccttcggcagttccgtaaagcttgtctgcggatcaagaccgttccgttccagaagaaaaagcagataccgttcctgcatccacggcttcagtgcgtttttgagcgcttttttcggtgcgtctttcagttccttgtgcatcttttgaaataactcttcctcgttgatgccgggaaacagatcgatgcgtaatttgacatcgggctgctttttcagttctttgacgacaaactggctgcagcggagaatggcggggcctgacaagccgaaatgggtaaacagcatgtccatcacgtgtgtgacaataggtttgccttttttattcaggacgctgacggccgcgtttctaagggacagcccctgaagtgttttttgtttaataaacggttctgacgacgtaaccggcacttccgtcggaaagagttcggtcacggtatgaccggccgcttccgcccatgcatagccgtctccggtgctgccggtatgcgggactgattttccgccgaccgcgataatgacggcgtctgcgttaatgtgttcgtcattgtttgtcgtaatgcccgctgtcctgccgttctcgtaccgcacctctttgattttttcatttgtgcggatggtgacattcagttgttttaatcggttcaaaagcgcatcgacaacgctttgggctttgtccgtcaccgggaacatgcgcccgtggtcttcttctttcagctgaatgccgagtttttcaaaaaaggcgatgatatcttcattattaaattcggaaaacgcgctgtataaaaagcggccgttgccggggatgtgtttaatgatttcttcaacggggaggcggttggtcacgttgcagcgcccgccgccggaaatcgccagcttccgtcccagcttgtttcctttatcgattaataatacgtccgccccttcttcgcctgccgcaatcgcagccattaaaccggacgggccgccgccgatcacaattacgtcataatgtttcatatttcatcaacaactttctttttcacgtataataggcggaaatgtccgcttcctgctattatagcgaaagaaggggattccttaaacgtattttgtttttaagagctttcccaaaaagtttcccgctgtaattattaccgtctaattgcccagttgtgttaaaatagaaaagttgaatcttcgtagaaaatggtgatgaggaaacatgtcaagcaaattgttaaggggcacgttcgtgctgacgctcggcacctatatatcgcggattttagggatgatttatctgatcccgttcggagcgatggtcggagcgacgggcggagctttgtttcaatacggatataatcaatatacactgtttttaaacattgccacgatgggatttcccgccgcggtttcaaaatttgtctcgaaatataactccaaaggagactatgagacgagcaggcggatgctgagagcgggaatgtcggttatgctcgtaaccgggatgatcgctttttcaattctttatatttcggcgccgttttttgcggaaacatctctcggcggcacgagtaacaacggacttacgattgaccacgtcgtttatgtcatccggatggtcagtctggcacttttggtcgtgccgattatgagccttgtgcgcggttttttccaaggtcatcagatgatggggcccacagccgtttcacaggttgtggagcagcttgcccggatcatctttttattgggcgcaacgtatttgattttaagagtgatcaacggcggccttgtcatcgcagtcggatacgcgactttcgcggcgctgatcggatcattcggagggcttgtcgtcctttatatttactggaataagcggaagggcgatcttctggcgatgaagccgaatctcgtcccgtctgcgaacttaagttataaaaaaatgttcattgagcttttcagttatgccgctccttacgtatttgtcggactggcgattcctttgtattcatatatcgatacgaatacgtttaataaagcgatgattgcggcgggccataaggatatcagccaggacatgcttgcgattgtcaccctttatgtgccgaagcttgtgatgatcccggtttctctggcgaccgctttcggtctgacgctgattccgacgattactgaatcgtttacgagcaggaattataagcttttgaatcagcagattaaccagacgatgcaaattattctgtttttggttattcccgccgttgtcgggatgtccgtgttatcgggtccggcctatacgttcttctacggctctgaaagtcttcgcccggatatcggacaggatatattgttctggtacgcgcctgtcgcgattctgttttctctgtttaccgtaaacgccgcgatcctgcaagggattaataagcagaaatttgctgtcgtgagccttttcatcggcgtcattataaaagtggtgctgaacgtgccgctgatcaagctgtttcagggagacggggccatcttggcaacggcgctcggttatatcgcttctcttctgtacggttttatcatgattaagcgccatgcgggctattcgtatacggtacttataaaacgggtcattttaatcgcagtcctgtccgtcgtgatgggagtcgcggtcaagctgactcaatggctgctcagtttctttgtaacataccaaagcggccaggtgcatgcggcgattgtcgtctttgtctgcgccgctgtcggcggtgcggtgtacatgtttgccgcgtaccgaatcggatttttacagaaaatgtttggaaaccgtctgccccgcgttttgaggagaggcaggcattccgcccattgagaaataatgaatagtccgcttatcgcgggcttttctttttaaaggagaggatcaggatgagacttgataagctgcttgccaacagcggattcggctcaagaaaagatgtgaaaaaaatcgtcaaggccggggctgtcatgattgacggagagccggcgaaagatgtgaaaacccatgtcgatccggaaaaacaggacatcacggtatacggagagccggcagactatcgtgaatttatttatgtcatgatgaataagccgcaaggagtgctgtccgctacagaagacagccgccagcaaacggtggttgatctgctgacgcctgaagaacagcgatttgaaccgtttccggcgggacgtcttgataaggatacggaaggctttttgcttctcaccaatgacgggcagctcgctcatcgcctgctttctccgaaaaagcatgtgcctaaaacatatgaggtccggttaacttcacctctggcatcggaagacatcgttcatctggaaagaggcgtcgtcattgaaggaggctataagacgaagccggcagccgttgaaatcattacagaaaacccggatgaaacggtgattcacttgaccattacagaaggcaaatatcatcaggtgaagctgatggcaaaggctgtcggaaatgaagtggcttatttgaagcggctttcgatgggggctgtttctcttgacccggatcttaaaccgggagaattccgcgagctgactgaagaggagctcgaaacgctgagaggcgctgaagtgtaatcgatatcagaaaagcccaaaacagatttgttttgggctttttatatagaggaacaaaaaacaaggcaaagacgctgctttgccttgcagcatgtcaggccgaaaagggccttatgtaattgttcgcttaagatgtaattttcactttttttcgtgttgtctcccacttgcctcggctaggactatgaacaagatcattgtatgctaacacatttaagtctcgctgaatggttctaggtgtaatgccgaattcatcaaccagttcctgtgttgtcacaaggcctttttcctggatgaacatgtaaactgatttaatccgagtcagcatacgatttgttgaaggtttcaaaaaaccactccctatcataagatcggatggacttgatataccacaactttcgactctaaaacttcgtacgaataagcaacaaaggatgacattctgttttttttctcttttaactgcctccattatacacgatatggacgacatgaatctaggaataagcgcagataattttttccaaatgggtgcagccttggtgcattactatgtccggaccgcttttaatattatggaaactgaaacttttttatacatgtccgtatgaaagcgggggagtgagaagtttgggagaattattgaatgcaaacattgtctgcgccggttatgctgacaggccgaaggtgatttccgatgtatctctgtcagtcaacgctggtgaaattgccggtttaatcggagcgaacggcgcggggaaaagtacagtgataaaggcggttctcgggctgtcccgggatattgaaggcggtattgagtggaatgattcatcttatgcttacataccggagcggccgagtttttacgatgaactgacgctttgggagcacctcgagctgaccgggtcattgcggggtatagaaggggaagagtgccgtgagcgggcagggcggctgcttgaagagttttcgctgacgtctgtaaaacatgatttgccttccggtttttcaaaagggatgcagcaaaagatgatgcttatacaggcatttttggcgaagccggatatttacatcattgatgagccttttatcggacttgatccgatctcaacgaagctgtttaccgacatgctgattgctgagaaagaaaggggcgcgggaattttgatgtgcacgcatgttctggatacggcggaaaaaatctgcgaccggttttatttgctggatcagggcgctctgcttcttcaaggcacgttagaggagcttcaggaaaaaacggggagccgttcactgctggattgcttttattcagcggttcggagcagtcagcgatgaccgggcgggctttgttttttcaaaggctgtttcattattggcggtatcaatggaaggtgtttcagacggtcattgattggacggtcgcgctgtacatcgttcttcccgctgccgcatttgccgtttatcaatatgctgaatggctgaacggcagggggcttcttaatggagcggcaggagtattaggatggggctggctgtatgtattcagtgccttgctgttgtgcacgggttttattcatacctttttgctggaagcggatcacgtgtttttggtgcatgcaaaacatctgatgcaaaagctgaaacggtacgcgcttttgtattcgatgttcctttcccttatcaaatggggtgcgcttgccgtattgttatttcccttatggcgccagtacggtgactgtaccttaccggcatattcaggtatgttttgctgtctgttcggcttccataccgcgatattagcggtgcaccggcacagaaaaaacagcaggcggacattcgggaatcaggcggcgggctggctgaaagtgatggttctgacggcgggtgcgttttttatgatcacctttgccgccgaatggtattggctttggccggcgggatgtatattgttcatctgttccgcttttttgacttggaaagggacggagacattatcagcctttgaggaagaagtgcttgaggagaacaggcggaagctttcactcgccgcctcagttttgatgctcagccatgatgtgcagctcccgaatggtaaaaataaagggcggagcaagccgtttttatatcccggctcaaagcacatctttacaaaacggtcggcgtatacggcgtggaaagaattgttttttaaagtgctgatccgaaacggcgggtatctccggcagctttaccttttaaccgcggcttttacggctcttattctcgttcttccgctcttagtgaagccggcagtccttattttatttgcgatcgtcagccgctatgccgcgtcacttttatttgaccggatcacggataaaccggttttaagcggtatcaagagagacagtgatgactatttccgggcgcgaaacagtgcattaaccgtcattcaaatcatctgttccgcctggtgtctcattgccgcgattctttccgttctttatatgtaaaaatccctttccgaaaaggaaagggatttttcttaatgtccgttcaaaataaaaagctgaataaaaaacagcacggcgaagatgaggactagaggatggatttcgcgccattttttcttagctgctttaacaagcggatatgaaatgaagccgagtgcgattccggttgaaatactggacgttaaaggcatcgccaaaatgacgagaaaggccgggaacgcttcgtcaagctcattccagcggatattcgacacagcacccatcatcaggctgccgacaataatcagagccggtgacgtaatcgcggacacttccgataagacgctgacaagcgggctgaaaaacatggaaacggcaaacataacggcaatcgtcagcgccgtcagacctgttcttccgccggcggccacacctgctgaagattcaacgaacgcggtcgtcgggctggtgccgaagatgcttcccaccgtcgtagccgttgaatcagccaacagcgctcttctggcattcggcagctgattgtttttgatcaatcccgcttgttcagcgacaccgatcatggtgccggtcgtgtcaaaaatcgtaacgagaagaaaagaaaacacaacggcgtacagaccgtgatgcacgacatccccgagggcaccgaacggatttgtgattaaaagcccctccggcaggcgcggaaatgaaatgaaccctttcgcaaaatggatctgtccggtcaaaaaggcaatgacggcggtcagcgccattccgatgaacagagcgccgtttacattcagcaccatcagcacgatactgatgataagtccgataagcgttaaaatgacggcgggcgaatgaagatcgccgagtgcgaccagattggatttatcagccgtgatgattccggattggcgtaagccgataaaagcgataaataagccgatgccggtcgtaattccgtattttaaattgtccggaatcgcttctataagttgttttcttaaaggcgttaacgataaaataataaagatgactcccgcgataaaaacggcgctgaaagccgtctgatacgtaatgccgctgcctgtgccgacaacgtgaaaggcgagatacgcgtttaagcccatgccgggggcaatggcgatcggaaaattcgcagcgagagccatccataaagttccgacaatggaagcgataatcgtcgcggtgaacacctggtcaaacggaattcccgcattggaaaggatcaccggattgacgacaatgatatacaccattgtgaaaaaggtggtcaatcccgcggtaatttctctttttattgtcgtttgatgcttgtcgagatgaaacataagtacctccaatgacgaacattttttcaaaacatcatctatattattcgttttatcgacattttgcaagtctttatcaagaaaggggatttgtgatgaactgggaagttgaagtcatcagaaacaaagaagatctgatccgtgacacgcagaagtttttgcagatcaacagcgtaatggacgaatcaacagccggtcccggccggccgtttggagaaggcgtcaatgccagcctggcgtcactgctggaattcggtaaaaaagaaggcttcaccgtaaagaatcttgacggctatgcgggccatattgaatggggaacgggtgacgaaatcgtcggtgttttgtgccacgtcgatgtcgttccgcccggagacggctggacgagcgatccgttttcagccgatatcagggacggccggatatatgccagaggcgccattgatgataaagggccgacaatggcggcgttttatgcgctgaaaatcgtcaaagacatgcagcttcctttatccaaacgcgtgagaatcatcatcggaacggatgaagaaagtgattggagatgcgtggatcactacttcaaacacgaaaaaatgcctgacatcggctttgctcctgacgcagattttccgatcattaacgcggaaaaaggaattatagatgcgtcactgcgcattgtaaaaaacgcttctgacaaagacgcaaaaaacgtgcttctgtcattccgttcaggactgcgcttgaacatggtgccggatgcggctgaagcggttattgaagggaacggtattgatgccgtgcacgcatatttcagcaaatggcttgagcagtcaaaaacacaaggtgaagcagtttcggaaaatggaaaactgacgcttcgggtatacgggaaatcatgccacgcgatggaaccggataatggtatcaatgccggcttaaagcttgctgaatgccttaacggaacagagctggatggagccggaaagcactttgtcaaaaccgtcagtgactattttttaaatgatacacgaggcaaaaagctgaaaattgattgcagggatgacatcagcggagagcttacattgaatgtcggcacctttacatacagaaagggtgaggatggagaactcggcatcaacatccgttatcccgtcacttcagacagcaaagtcatccgtgatgcttttacgtctgctgaagaattccggcttgaagaatttaaagacagcaaaccgcaccacgtttctgccgatcatccgctcgtaaagacgcttcaaaaggtttacgaaggacagacgggaaagaaagcggatctgatttcaatcggcggaggaacgtatgcgagatccctttcggcgggcgtcgcgttcggtccgctgttccccggccggcctgacagcgcgcatcaaaaggatgagtacattgaaatcgatgaccttctcaggtcaacggctttatatgccgaagccatttatgaacttgccaagtgataataaaaagggacgccgaaagcggcatccctttttatcattcaaatgaccataaatccgtggataaataacgttctcccgtatcggccgtcatacagatgacgatctgttcgggagggaggcgtttggcggtttcaatggcggcgaagcaggcggcgcctgaagacgggccgacgagtatgccttcttcccgggccagacgacgtgttgtcgtatacgcatcttcatcagatattttcatgatttcatcgtaaacgtcctgattcagtatgccgggaataaatccggggcttgtcccgacaagcttatgagcgccgggttttccgccagacaggacgggagatcccgcaggctcggcgacatgaacaatcatatccgggaaaagctctttcagcgtttctccggttccggtaatggtcccgcccgttcccgccgttgccacaaaagcaccgagcggtctgttgagctgctgaacggcctgatagatttcaatggcggtcgtttttcggtgggcatctggatttgcgccgttatcgaattgcatcgggataaaacttcccggaatctgttcggcgagttctttcgcttttttgatgctgccgggcattctttccgcccccggtgttaacacaacctccgcgccgtacgctttcaggaggttgatgcgttctttcgtcatcgtgtcaggcatgacgaggattgccttgtagccgcgcgccgccgcgttcatcgccaggccgatgcctgtgttgccgcttgtcggttcgatgatgacagagccgggttttaaatgcccgctgttttccgcttcaatgatcatattgtaagccgctctgtctttgacactgccgctcgggttaaacgattctaattttaaatagacctgtgctgcatgttctggctgaaggcgattgagctttacgatcggtgtgccgccgatcagctccgccgtgctgtttacgattttcaaggccggctcattcctttctgtataaaacgttcggtacataatatcctatcataatgagcggacagggttctcctctccgcttatccgttttataataacaccataaccaaagagggggagatcctcgtatgaaagcttcattgccgcattattttatcggcattccgattccggctgacattgctgaaccgatttgggaagcagccaaaaaggagccggcgttatcattcaaaaaatgggtgcacccgcatgactatcatattacgctcatttttctcggagccgcggatgaagaacggcttgcgaaattatcgtctctgctcgcagatgctgcgtcggcagcgcagccgtttaccgtacagtttcagcatctggatattttcggcgaccgcagacagccgagagtgcttcaccttgagcccgaacggaatgaactgctctttgatttgcgggaaaaaacaaaacaggctgttttgaaagccggttttcaagtggaaaaacggccgtatcaccctcatatgacgatggcgcggaagtgggcgggagaccggccgttttctgacgatgtgccgtttgaaagcggcagggtgcaaagtgccgtcagcaggttttccctgtttcagacccatcttgaccggtcgcctaaatacgaagaaatcgcacagtttcaattgacataaacaaatattcggagtggagaaatcacatggcacagatcatcaaaattcacgactgcatatccagatatgaacttgatccataccattatatgaaccagtttatccggctgaagaaagaacgctgggaggcgcttcttgaagcgtttgaccggataacggaagaaacggaaacggctgccggcggggaaaccgatcaagcgccggccaggaaaaaattttccttaaaaaagagaaaagaagaaaatacggccgatataaatgaaaagaggcaccaatggtttgatgaaccggagggagaagaggcgctgttcgggaatcttccgtctcaaaagtctgagctcgcgccttttttcaaagatcagctgtatgactttcaattaaaatgggcgagctccacgctttctcaaaagtctgagctttcgcaggcggtcaaaagggacaggatgttaaaaatgctggctcaaaaactgcccgattcctattttgtgatgtatcatccggttctgcaaattcagcaggcgtccgtcgaactgagcattatcatcatctcgccgctggagattttctgcgccgcttttatggaagcggaagaggacagtgtatatatcggatcaaaacaccgtttttgggaagaaagaggctccggcagcacgcgccaagtattgaatccgtctctcagcctgcaccggacgggctcggtcgtttcgcaaatcgtaaaagaaaagcaggccgacattcccgtgcggaagcttttgctcagcagaacgtcttatattgattacccggagccgccgtacgggctggaaatagctgataaacggactgcggcagggtggctggaaaagcagcagaaaaatacggcgccgatcaagcaccaccagctgaaggcggcgaaggctcttttgtcttacggcttgagcgattcaagccggagacaggaatggcttgattaaagcggacgtttgccggctgtctcttcatctatgaagcaggtgaaaacaaacgatgagtcaatggttttttattattaatccggtctcaggaggcgggcggggccggcgtgtctggaaatcagttcaaaaagagctgaccaggcgcggggtcagccaccgctcttttttgaccgggcatcccggacatgcggaggtgctggcaagacagatttcaatgatgcaggatcataagcttaagcggctgttcgtcatcggcggtgacgggacgatgcatgaagtcattaacggactgaaaggaacggatcagattgagctgacctttgtgcccgccggttcgtacaatgacttttccaaagggctcggtattaagaagtcggcgctcctccaagaaatcaaaagtctgcaccgcccgctcacacggaaattttttgcgggaaacatcaacttttttcatgacaaagcgcaatcactctattttattaaccacctgtctgtcggcttcgatgcctcagttttgaaggcagccgcgaattttccgttttcgcgcgttcttcggtttttgcgtctcggctttgtgatttacccgctcgcgcatttacatacggcctcggggtttcagccgttcagatttgtttgcacggcagacggccagagacgtgaattccgcaatgtctggtttgttattgcggctaatcacccttattacggaggcggcatgaaagcggcgccttcagcaaatccccgtcaaaactattttgatattgtcattgcagaaaacctgtcctttttttcgctgtatcgttttttatgggcgatgagcttcggccggcatatcaaaatggacggagtgacgatgataaaggggaaggaattcgtttttgaaacagatgggaaaattccgtttcacgctgacggcgagctgatcggaacgacgccgtttcggcttatgccgggcggtgcgccattgaaaataaaaacataataaacaaatgaaacccgtcaattgtttcacggcaacagagcggttcgcggcataaatcttcagaattcacaggtgttcttgctagttttgcttgacgaagtttgtgctgtagcgctaaaatttataggacggctattgattagcatatgagactctcaatagctgtcttttttattctcatgaaattgtttatgacaggccgctccgccaatagagaaaggctggaggcctattctaaaatattttaagaaatgatgggttgaacattgatatgaactggttgggacaattactaggtagcgattgggagatcttccccgccggaggagctacaggagatgcatattatgcgaaacataacggccaacagctttttttaaaacgtaatagctcgccctttttagccgtgttatccgccgaaggcattgttccgaagctggtttggacaaaacggatggaaaacggagacgtcattacggctcagcattggatggcgggcagggagctgaaggcaaaggatatgagcggacgcccggtggctgagctgctccgcaaaatccacacatcaaaagctttgctcgacatgctgaaaagattgggaaaagaaccgcttgatccgggcgcccttttgtcgcagctgaagcaggccgtctttgccgtgcggcaattttcgccgcttattcaggaaggccttgcttatttggaagctcatgtggatcaggtgcaattcggtgaaaaagtcgtttgccattgtgatgtgaatcataataactggcttctgtctgaagacaaccagctgtatttaatagattgggacggcgccatgatagccgatccggccatggatctcggccctttattgtatcattacgtcgaagagccagcgtgggacagctggcttgggatgtacggcatgaagctcacggaagggcttcggctgcggatggcgtggtacatgttatcggagaccatcaccttcatcgcctggcacaaatcaaaaggaaacgacaaagcgtatcatgatgccatggaagagcttcatgccctgatgaagcggattgtcaagtagtcaggagtacgaatccatctgctccacccattgggacaaatggttttggtgctcctgaatatgcgtgtcgatggaatcggccgtgatgccggactggctgtagcggtagacatcctcgagcacgttttttatatttgaatcaagcccggtgttggccatcagtgatttgatgacgcgctccagctgttcatactcggcaaccgtgccgcagcaatccaattgatggtcggccaatatgtcctttaataaccggacctgatgttcgcttgttaagcccatgattcatatacacatcctttctgtgtcatacattgtgcaaagcggtgcggttttatgcatcacatgagtgttccggaccggggagcctctttttttatgcggccggcgcctttaaaaggcgcttgcggctctttatgtttcatggtatgttgttactcgaaattatagatagaggtgtcaatcatatgagaatgcgccataaaccttgggcgaatgattttctggcagaaaacgctgacatcgccatcagtgatccggcccagtataaagggcggtggaatacggtctttggcaatgacaacccgatccatattgaagtcggtacgggaaaagggcagttcatttcaggaatggccaagcagaatccggatatcaactatatcggaattgagctgtttaaaagcgtcatcgtcactgccgtccaaaaagtaaaggacagcggggctcataatgtccgtttgttaaatatagacgcggaaacactgaatgacgtatttgaacggggagaaatcaagcgcgtttatttaaacttttctgacccgtggccgaaaaaccgtcacgaaaagcgccgtttaacatttaaaacgttcttgaaaaaatacgaagaagtgatgggcgaaacaggtgagattcatttcaaaaccgataaccgcggtttattcgaatactctctgaaaagcttttccgaatacggcctgcttctgacagaagtcagcctagatctgcacaacagcgatccgaagggcaatattatgacagaatacgaagaaaaattctccgcactcggccagccgatttaccgggccgaagttgaatggagaacaaaagacagactctgatgcgggagtctgtttttttatgccgccatttgctaccattatatcaggagggatcaagatggagacattgaatattgggaatatttcattaacatggctggacggcggtgtaacacatatggacggcggagcgatgttcggcgttgtcccgaagcctttatggtcgagaaaataccccgtaaatgacaaaaaccagattgaattaagaacagacccgattctgatcagaacaaacggcctgaatatattggttgacgcgggtatcggcagagggaaattttctgataaacaaaaaaggaattacggtgtaacacaggaatccaatttaaaacactctcttcgtgaactcgggctttcctgtgaggacattcatattgcggcgatgacccatcttcattttgaccatgcatgcggcttgacggaatacagcggagaggagcttgtctctgttttcccgaatgcccgcattatcacttctgcaacagagtggcgcgaaatgagaaaccctaatatcagatcgaaaaatacatattggagagaaaattgggaggcggtacaagatcaggtcgaaacctttgagaacgagtatcagctgacagaaggcattacgatgcaccacaccggaggccacagcgacggccacagtgtcatcgtcttagaagacggcggggagacggctgtgcattttgccgacctgatgccgacgaatgcgcataaaaatccgttatgggtgctggcctatgatgattatccgatgacctccattccgcaaaagcagaaatggcagacgttcgcggcagaaaaaggcgcctggctgattttctatcacgacgcgatttacagagcggtaaaatggggagaagacggcgaagtggctgcatctgtcaaacgggagagaaaataagcggatcgatgatttacctgtatgaatttcgggaataaaagcaaacctaagacaaattgctttgaaaggaagagacaggtgaatcaatttcaagtgacgaaagatggagaaatcaaaacaactctgcgcggattagaagtgctttctacgccttttttaaataaaggggtggcctttacacaggaggaaagaaaggaactcgggctcgagggatttctgccgccgaaagtattgacaatcgaagagcaggcgaggcgggcctacgaacaattcagttcgcagcctgatgagctgagcaaaaatgtgtacttgaccgctctccatgatcggaatgaaacattattttacaggctgttaaatgatcatttaggcgaaatgctgccgatcgtatatacgccgaccgtcggcaccgcgatccagcgttacagccacgagtacagaaaaccccgcggtctgtatttgtcaatagatgaccctgaaggaatgcgcgccgcatttcagcagttcggaaaaaatgaaaacattgacttgatcgttgcgacagatgcggagggcattctgggaatcggtgactggggcgtcggcggcatcgccatttctgtcggaaaactcgcggtgtatacggcggccgccggaattgatccgtcacgagtgcttgcggtcgttttggacgcggggacaaatcaagaaagcctcttaaatgacccgctgtatgtcggaaaccaacattcaagagtgcgcggcgagaaatatgaccgctttattgatgagtatgtctcgcttgcccgggaaacattcccgaatgcgctgcttcattgggaggatttcggcacggctaacgcccgcggcatattaaaacggtataaagataaagtctgtacgtttaacgatgacattcaaggaacaggcgcggtgtcgcttgcagctgttttagcgtgtgcgaaagcatcaaaagtgcctttaaaagagcataaagtcgtcgtcttcggcgcgggaacggccggtatcggaattgctgagcagctgcgcgaagctatggtgcataacggattaagcgaagaagaatcatacagccgcttttggtgtatcgacagaaacggattgttgacggatgatatgaaggacttgcgtgattttcaggttccgtacgcccgccctgctgatgaagtgaaagagtacggccgcagcggtgaaggcggatcaattgatctggcggagacggtgcgacaggccaagccgacgatcctgatcggcacatctaccgtttcaggcgcatttacggaagaaatcgtcaaagaaatggcctcacatgtcaaacggccggctattttgcctatgtcaaacccgacgacattatcagaagcaaaacctgaagatttaattaaatggacggaaggccgcgcgcttgtcacaacgggaagtccgttcccgcctgttgcgtataacggcgttacctaccatatcggacaggcgaacaacgcgctcgtattcccgggactcgggctcggaacgattgtgacaaaagcaaggctcattacggacaatatgttcgttgcctgcgcgaatgccatcgccggtatggtggacgtcggcaagccgggcgcgccgatgcttccgaaagtggaggatctcaggacggtatcggcaaccgtggcggtagctgtagctaaagctgcgattcaggacggtgtagcggaaacggaacccgaggatctgatccaagcggttcaggacgcgatgtggaaccccgtatataaacgaattcggccgatgtaaccgaataaagcccaaaacgctgatggttttgggctttattttttgcttgtccgaattatgaggcgacagaatcaatgacatcgacaatctggcctgtttttgcattgaccataacttcatattgctccagttcgccgaatgccgaacgtgtcacgccggttttgtatacctggatggtttctccgtttacctggtagggctccggctctgtgtaaatccatgatccgtctatcggcccgcgctgtttaaaagccgctttcacgatacggagcgctttttctgaagagatataaggtttcatcgcatactttttcactgcgatggcagcgcataatccgactcctgcacctaagagaaaatgacgtaatttcaatatgaagcacctccaattatgtcgtagtttttattatacagaagatgccagacggtgttaagtaaagcggcggttttacagcccattcaatctgagcgcttggaaaacggttgtttttctaataaaataaaagcattacatagaaatgaggggaaaatatgaatgaggaaacgaaaacgcttttccggacgctgacgcagcttcccggcgcaccgggaaatgaacatcaggtccgctcttttatgaaacgggagcttgcgaaatatgcggatgacatcgtgcaggacagactcggaagtgttttcggagtaaggcgcggcgctgaagatgcgccgaccgttatggtagccgggcatatggatgaagtcgggtttatggtgacacagattacggataacggcatgctgagatttcagacgctcggcggctggtggagccaggtgctgcttgcccagcgtgtcgaggtgcagacggataacggaccgattatcggcgtcatctcaagcatcccgccccacattttaacggatgcccagcgcgcaaagccgatggagatcaaaaatatgatgattgatatcggtgccgatgacagagaggacgcggtcaaaatggggatcagaccgggacagcaggtcgtgccggtctgcccgttcaccccgatggccaacgagaagaaaatattgtccaaagcgtgggataaccgctacggctgcgggttaagcattgaactattaaaagagctgcacggaaaagacctgccgaacaatctgtacgccggggccaccgttcaggaggaagtcggcttgagaggggcgcagacagcggccaacatgattcagcctgatctcttcttcgcgcttgatgccagcccggcaaatgatatgagcggcgataaggagctgttcggccgtctcggcgagggggtgctgctccgcattctcgacagaacgacggtcatgcaccgcgggatgagagagttcgtccttgatatggcggaaacgcacaatatcccttatcaatatttcgcttcaggcggaggaacggatgccggacgcgtccacatatcaaacagcggggttccgtctgccgtcatcggcatttgttcaagatacattcatacaaatgccgctatcatccatgtcgatgattatgccgcggcgaaagaaatgctcattaagctggtcatggcgagtgacaaacagacggtcgaaacgatcagagaaaatgtgtaaaaaaaataagcagtcaataagtccctttgaatacttattgactgctgtttttacattctgttttaagccgcatgatcgagacagttctttgttgtgaatataagtgtaaagcgtattgtaaatagaattaggtaacacatattatttttcaatattattatcaaaatggttccgatccagataaacaaccttcgaacctttattgcaatgataaacgtttttaaatcaaaaacatgctgcaagcattgagaggagcagcgatttcacaaagtcgagtcatttgcatttttatttgttctgcaagaaggtatgattatgacaaaaaagacaaatataaactttcctcttgaactgattaatactgaagtggtgagtgtaggtaagcaggaccgcataaaagcggcctgcttattctgtttcaaataaataagagagtgctttcatcgcttgattgacggtttcgaccgtgatattcgcttttccggaaagctctttcagcggatgatgaagttctttcggacggatgagaatgagcggctttccttttgcgatggcataagaagcatccatcgcggtattccactgtttatatttctcgccaaacagggcgatcacaaaatcggctttttccatcagcacctctgtacggaaattgttgatatcagaagctctggcgtcttttaaaacagaatcgggctgcacgcccataatctcttctccgatattgtctgagcgttcatggttttccatcggaccgacaaacgtaatcggcaggttcagcgcttttgctttttgtttgatttcatcccgccaatcactgtggatttcacccgctaaatacacgacaaactgcatcttttgcccctccttatgtacatattcagattttcgtacggctacaagcaaaatggtaaacgaaacttgcttgataatgcaaatgaaatatgataatgatattgcatatagttggtcttgccgtaaacagtctggtatgatccaattggacaaacatcagcatataaaaaactcataatccagatggaggaatgacaatgaaaaagattgaaagcacggaagaattgcaaaaagcggtacaagacgattgggcggtatttatgttttcagcggattggtgcccggactgccgctttgtggagccgtttctccctgagctggaagcggactttcctgaattcacttattactacgtagaccgcgatcaatttattgatacatgcgcggaatgggaaatttacggcattccgagctttgttgtgtttaacggaggaaaagaagtgaaccgcttcgtcagcaaagaccgtaaaacaaaagaagaaattgagcaatttttaaccgattcccttgctaaagcataaaggaggccacgggctttgaaaatgacgtcaaggaagctggcggatttattaaaacagcgcctgcagcacgagaaccgatccttcttttttgacagagaaaaagacaccctccgtgttgaggatcaaacgaccaaaaaaggcatcacattggagctcccgccgatcattgcgaagtgggagacgaaaaaagaagaagcgatcgacgaaatcgtctactatgtgtcagaagcgatggaggcgatggaaggaagcggacaggagatgtccggaaaggaagccggaatctatccggtcatccgctccacgtcatttcccgatcaaacgagcgacggcattccgctcgtgtatgatgaccatacggccgaaacgagaatctactacgcgcttgacctcggcaagacgtaccgcctaattgacagccgtatgctcgagaaagaaaactggacaaaagaacggatcagggagacggcgtcattcaatctccgctctcttccttcggtcgtgaaacaggatacggttgcggataattatttttattttttcagggcgaatgacggctatgacgccagccggattctcaatgattcgattcttcatgaatataagcaggccgctgaaggcgaattggcgatttccgtcccgcatcaggatgtattaatacttgctgacattcgaaatgaatcgggttatgatattttagggcaaatgtccatgagcttctttgcaagcggcacggtgccgattacggccctttcatttctgtataatgaaggcagactggaacctgtgtttatcatggcgaaaagccggccgaaaaaggattagaaaggatttttcttatgaacgctttttacaataaagaaggtgtgggagatacgcttctgatctctcttaaagatgcagcacgcgaagaaatcggctatgaaagagaaggcgatgtcgtcagaatctttaacaaagaaacaaaagaaacgacgggctttaacatttttaacgtgtcttcttacttacagattgaagacaacggccccgtcgctttgtctgagactttcgtacaggatgtgaatgaaatactgaacagaaacggcgtttcagaaacgctgacggttgacctttctccgaaatttgttgtcggtcacgttgaatcgaaagaaaaacatccgaatgcggataaactgaatatctgccaagtgaatgtcggagaggaaacccttcaaatcgtttgcggcgcgccgaacgtggacaaagggcaaaaagtcgtcgtcgctaaagtcggtgcggtaatgccgagcggacttgtgattaaagacgctgaattaagaggcgttccgtcaagcggcatgatctgctccgcgaaagaactcgctttgccggatgcgccggcggaaaaagggattcttgttcttgaagacagccgcgaggccggcgaagcatttcaattctaactcccataaataagcgcacagaatcgaatgatgtgagagaaagccgttaagcaggcctgcttaacggctttcttcagttgggagcttaatcttttctgagccgcccggcaatggtatactaaatatcgtcccagactactaaaaagggagttagagagtgattaaacatgagttggctgaataaattttttgacttatttttaggtgaaaaagaagaagagcatgaacgtgaaccgaacacgcatgcccaaatccagaaacagcaaataccggatcagccagaaggcaaattaacgcgcatggaagattctaaaatatattacgaatatccgaaagggaatttccgcttcccggtcgttccggacggctataagcgaacggagcaaaaccaaagacagcgggaaaggcacgaacgccgccagccgtcccggggttatgccgccgggaaggagcaaacggagcggaaacagcatacacataaagagcctgatacggtgaaaaagccctttaaaccgtcatccattccttcaccggtttacggctttcaatctcagcacagcatcaaaaaagcgcctatttccgaaaagcggcgtgaagagaacgtaacattgctgtcagaggagcaatttgttccgccaaaatccggtcaggaaacggaaaaagagcccgtcttcacaacatccggtataacaaaacagacgaatgaccggccagaaccgtttgcgaaacaagaaacggaagaaattccggccgttaaaaaagaggagcttcacacggaggctgagaatgcaaaagagcaagtgtttgcagcaccagaaccgcagcaggctgaagagctggagcacaccgaaagcgcggagtctgccggctttacagaagaacaagagcatgaacaaacccgcccgcagcctataagagagcctgagtctgaagcatcccgaacggctgaaaacacagaggaacaagcggcgccggagggggaacatcaggagcctgagccggaaaaagcaccgccttttgaaaccgcagaagaaccggtgtatacatacacagaacccggatacgaggaaattcagccgcagtctgaagacaagcccgaatcagctgaacccgacgcgaaacaggaagcagactctcagcctgagtacaatgaagcagagcggcattcagaccccgagcctgaacctgtaagcattgagacgaccgatgccccatcccggcctgccgaagaaaaaacggagcatcacggacagcctcagactgtgagaaaagcggagcagccgaaagagcgcaatgttccgtttaacgtcatgatgcttaaaagcgataaacacaagcagacgaagacgccagagggcggagcgagctatgtctttccgaatctgtcgcttctggacgtaccgccggcgcaaagacatgacgaccaatcgtggattgaagaacagcgcgagcttttaaacgttacactgaaaaactttaatgtgcgcgcccaagtcgttcatgtcacacaaggcccgtccgtcacacgttttgaagtgcatcctgagcccggagtgaaagtaaacaaaattacaaacttagcagatgatattaaactgagcctgtctgccaaggatattcggattgaggcgccgatccccggtaaaaacacgatcggcattgaagttccgaaccgcgtaagcaaagtcgtcgatttaaggcagatgatcagaagcgccgctttcaggacgaatccgtctccgcttacagccgcgctcggtgtcgatatttccggaaacccggtcgtcattgatttgaaaaagatgccgcacgggttgatagcgggtgcgacaggatcgggaaaaagcgtctgcatcaataccattttggtcagtctgctttataaggcggatccgagtgatgtcaaaatgcttctgattgatccgaaaatggtcgagcttgcgccttataaccaaattccgcatttggtcagccccgtcatcacggacgccaaagccgcgaccgccgcgttaaaatgggttgtggaagagatggaacggcggtatgaactgtttgcccattcgggtgtgagagatatcggacgctttaatgaattaacggccgatcataagacaggcgaaaagctcccttacctcgtagtggtcattgatgagcttgccgatttaatgatggtcgcgccgaacgatgtggaagaaagcatcgccagaatcgcgcagaaagcgagagcctgcggcattcatctgcttgtcgcgacacagcgtccgtctgtcgatgtcattaccggaatgatcaaggcgaacataccgacgaggattgcattctccgtctcaagccaggtagattccagaacgatcatcgacatggcgggagcggaaaagctgctcggaaaaggcgacatgctgtactgggaaaacggtaccggaaaaccggtgcgcctgcagggcaactttgtatccgacagagagattgaccgcgtcgtctctcatgtcagaaagcagctgccgccttcttatttgtttgaacaggaagaactgatcaggcagggaaccgcccttaaggaagaagacgaactgtttcctgaggcgtgccaattcgtcgtggagcaaaacagcgccagcacctcaagccttcaaagaaggttcagaatcggttataaccgcgccgcgaggctgattgacatgatggaagccgaaggcatgatctcagaagcgaagggcagcaaaccgcgtgaagtgctgattacggccgctgacatttctcaagaataagaatatcgttcatttttctcacaaacatggtatgatagtggatggaccatcaaaactgcatcactgtcacgcgctgaaatatcatgcggcaggtttaatcaaaaagaaagttacagatactgacgataacgtaaaaataaatggaagcgccgctgtgcgggcttttcgcccgctgcggtcgcaaaatgaaatgagcgtcatatactggggaacagatagacgtttgttggaggtacgattatgactgtttatcattttgttggaataaaagggacaggtatgagcccgcttgctcaaatcctgcatgatacggggtatcaggtgcagggatcggatatcgagaagcagattttcactcaggctgcccttgaaaaaagaaatatcccgatctatccgttcagcgccgataacatcaaacccggcttaacggtaatcgccggaaacgcattccctgattctcatccggaaattgcaaaggcgctcgatgaagggattcctgtcatcagatatcataaatttttagctgaatatatgaaaaaatacacaagtgtcgcggtaacgggcgcacacggcaagacgtccacaacgggcctcttggcacacgtgatgcagcaggcgaagccgacttcgtttcttatcggggacggaacgggcagaggaaatgaaagcagcgaatactttgtatttgaagcttgcgagtaccgccgtcatttcttaagctatcagcctgattatgcgattatgacgaatattgattttgaccaccctgattatttcgccaacattgacgatgtgtttgatgctttccaaaacatggcgcttcaagtcaacaaaggcatcattgcctgcggtgatgacgagtacctgccgaaaattcacgccaatgtgcctgtcgtttattacggcacgggagaagaaaacgattttcaagcgagaaacatcgtaaaaaatacggaaggcacgacatttgacgtctttgtccgcaatacgttttacgatacgttctacatcccggcatacggccatcataatgtcctcaattccttagcggtcattgcgctctgccactatgaagaaatagacgtgaacatgattaagctcggacttgaatcattcggcggcgtcaaacgcagattcaatgaaaaagtgatcggcagccaggtactgatcgacgactacgcccaccatccgactgaaatcaaagtcacgattgaggcggcgcgccaaaaatatcccgaacgtgaaatcatcgcggtatttcagccgcatacgtttacacggacgcaatcattcctggatgaattcgcagaaagcttaagcgcggccgaccgcgtgtatctgtgcgacattttcggctctgcccgtgagaacgtcggcaagctcacgatcacggatcttcaggaaaaaatcgataacgcagaactcattgaagaaaatgacacttccgtgttaaaagcgcatgaaggcgcagtactgatcttcatgggcgccggagacattcaaaaatatatgagggcctatgaaaacgtcatagcgtaacgaaaaagcagtggggctctcactgcttttttgcgcgtgctgcaaagggatttaccgataaacggagaaatagtatacatacagacctttcatatatgtttatcattttaagaattgggtatataccactatatcctgcattaaggaggtattagatgatcatcattctttacttaagcgtcgcactcattgccgttgcatttctcatcctcgtcatctatctgtccaaaacattaaagtccgtgcagatgactttaacaaacgtagcctcgactttagacggccttgaagggcagatgaaaggcattaccgcagagacaaccgagctgttacataagacaaaccgtctcgcggaagacattcaggaaaaatcagagaaattaaatacggttgtccatgctgtccaggaagtgggaacttccgtccagcagtttaatacatccataaagcaggcagcaggttctgttacggcctctgtaagagagaatcaggataagatcagtcaggttgtcacctggagccaggccgctatggaaatatgggacaagtggaagcaaaagaaaaaaacatcgctttaatcataagaaaaatccactaaggaggaatcataatgagcaaagatggaatcaatagtaaggattttttaatcggaacgctgatcgggggaattatcggcgcgacaacggcgttgtttctggcgcctaaatcaggtaaggagctgcgcgacgatctcggcagtcaggcttctgcgttaaaggataagacggacagaatgacggccgacgcgaaagaaaaaggctctcaatatgtcagcatcgccaaggacaaaacatctaatatcacccagctggtagctgatcagtcaggtcagattatgaataaagtgaaggatttaaaagaccgttctaagagcacactaaccgagaaagccgaagagacgagaagcgaaatgcaggacacggcccaaagcatcaaggccgaagcggaagacgccggggaaaaagccggtcaggcaaatcgctgatcttcaataaggagagataaccgacatgacaaaacagctgatatcgtctgaagaagagttcaaaaatgccgctgagaaagaaaacacgctcgtgtttttaaaacacagcacaacctgcccgatcagccaagccgcgtttcaggagtttgacgcctttgcatcggagcattcagaagtaccttcttattacctgcatgtgcaggacagccggccgctttcaaactatatcgccgaggcatacggcgtgaaacatgaaagcccgcaagtattcgttattacaaacggcgaagtgaaatggcacgcgtctcattcacaaatcacaaaaaacgcaatagagcagcacctttcataattgctggccgccggttgataccggcggtttttttttgaaaaaaactattgatcatttcagccggatcatgtaggatatcaatatatactgcttcaacgcataaaagcttaaaagcgtttttgtgataaagtcgaatgtgaaaaaatttattatttcatattcctattttcgcataactgtagtaagatgcatgttaaccattaaaataaaacatagcatagaagggatgaaaaagatgagcaacaaggaattagagagtctaagacagcaggcagacgcactaaacttagaaatccttaaattaatcaatgaacgcggagccgttgtaaaagaaatcggtaaagcaaaggaagcacagggtgtcaaccgatttgaccctgtcagagagcgtacaatgcttaaccgcattattgaaagcaatgacggcccatttgaaaactcaacgatccagcatattttcaaagaaattttcaaagccggacttgaacttcaagaagaggatcacagcaaagcgttgctcgtctcccggaagaaaaaagcagaagatacgatcgttgacattaaaggtgaaaaaatcggtgacggcgatcagagattcatcgtcggaccttgtgccgtagaaagctatgagcaggttgccgaagtcgcggccgcagcgaaaaaacaaggcattaaaatcctgcgcgggggcgcgtttaaaccccgcacaagtccgtatgatttccaaggtctcggcgtagaaggcctgcaaattcttaaacgcgtcgctgatgaatatgacctcgcggtgatcagtgaaatcgtaacgcccgcccacattgagcaagcgattgattacattgacgtcattcagatcggcgcgcggaacatgcaaaactttgaattgctgaaagccgccggttccgttaaaaagccggtattgttaaaacgcggtcttgccgcaacaatttcagagttcatcaatgcagctgaatacatcatgtcacaaggaaacgaccaaatcattctttgtgagcgcggaatcagaacgtacgaaacggcaacgagaaacacactcgacatttctgccgtgccgattttgaaacaggaaactcacttgccggtgtttgttgacgtcacacactcaacaggccgccgcgatctcctgcttccgacagcaaaagcggcgcttgcgatcggcgctgacggcgtgatggccgaagtacaccctgatccttccgttgccctttcagactctgcgcagcagatggatatccctgaattcgagaaatggctgaacgaattaaagccgatgctgaaagtaaaagcataatacaacgttccgctctttaaaggccgcctcgcgcggcttttttttcgtatcttcattttatttaattataaaatgaaagtgaacgttttcatcattgggaaaaacgtgtataatttcatgagagatatttaaatttgatgaataatgaaaaataatgtacactactgacttacgcttacaatcataaacgacagaatgcgaaatcgtacgacatttctttacataaagtgtttatgctatagataaggataagtgtatccagtaaaaggagtggtttcagtgagcaacattacgatatacgatgtggccagagaagcaaatgtcagtatggcgactgtttcccgcgtcgtgaacggcaacccgaatgtaaaaccgacgaccagaaaaaaagtattggaagccattgaccggctcggctaccgcccgaacgcggtggcaagagggcttgcaagcaaaaaaacgacaacggtcggcgtcatcatccctgatatctcaagcattttctactcggaacttgcgcgtggaattgaagatatcgcgacgatgtacaaatataatattatcttaagcaactcggatcaaaatcttgagaaagaactgcatctgttaaatacgatgctcggcaaacaagtggacggtatcgtatttatgggcggcaacattacggacgagcatgtcgaagaatttaagcgctctcctgtgccgatcgtcttggctgcatcagtggaagaacagggcgagacgccttctgtcgccattgattatgaacaggcgatttatgatgccgttaagcttttcattgataaagggcatcgcgatattgcattcgtctccggaccgatgcaagagccgatcaaccgttcgaaaaaactgcaagggtacaaacgggcgcttgaagaagcggcgattccgtttaacgagcaattcgtagcggaaggcgattacacttatgattccggtatggaggcgcttcaaagcttgatgggccttgaccggaaaccgacggcgattctttctgcgacggatgaaatggccctcggcattatccatgcggcccaagatcaaggtctttcgatacctgatgatcttgatattatcggttttgacaatacgagattgagcctgatggtccgccctcagctttcaacagtcgtgcagcctacgtacgatatcggcgccgtggcgatgagacttttgacaaaactgatgaacaaagagccggttgaagagcatatcgtcgaattgcctcaccgcatcgaattaagacaatcaaccaagtcataaaaaaacggaaaagcaagcttcactctgaggggtggaatcttgcttttttacttgagtaaggagaagatatgaaacgttttgattatctgacgcccgttggctttatgttaggctgtattattgtcgcaatcggtattctgtcagggacgggactggcgggaatcagttcatttttggatctgacttcttttttaatcgtcacaggcggccttgccgcggcggtctttatcagctttccgccgagggatttaaagaaaaccccttctgttctgaaacaggtattctcccgtcaggatgacaatgtgaaagagcttgtcagagtatttgtcagcctttcggagcaggcgcgcaggcaggggctgctgtctctggatgaccaggcgcgggagatcaaggatccgtttttaaaaaaagggcttttgcttgcgattgacggctgggacgaggaaacgatccggctggtgatggattctgagatcgccgcaatggaagaaagacacagaaaaggaagacgcgtttttgaaaaagctggtgatttcgcacccgcctggggaatgatcgggacgctcgtcggactcgttctcatgctcaaaaacttaaatgacccgcataccctcggaccgaacatggccgttgcgctattgacgacgctgtacggagcgctgcttgccaatttggtgtttatcccaatcgcggcaaagcttgaagaaaaaacggaaagtgaaattttcatcaaacaggtcatgatcgaaggggttgtcggcatccaatcgggcaaaaatccccgcaacctcgaaagtcagctcgtcgtcttcagctcaagagaagactggcgtaaaggacagcctgcgaacaagaaaaagggcgctgtccatgaagcttagaaaagagcgttttgaaagaagaaacaaaccggaacattccggcggttcaccgagatggatggtgacgttcgctgacttgatcacgctcattctcgtgttctttatcttgcttttttcgatgtcgcaaatagacgcggaaaaatttcaatctgccgtttcatcgattcatacaaacggcagcggaggtgaaccggcgtcatcagacaaagcaaacgaaaataaagaacaggatttgctgttacaaaacgtgaagacatacataaaagcgcatcatttgagttccaaattgacggcgaagcgcgatgagcgcggagtggttcttgtgctgcaggaggccgttctgtttcagacgggaaaagcggatgtgctgaaaaacgccgagccggttctgcatcagatcgcggtgcttttaaaaacaattccgaatgacatacaggtagaaggccatacggacagccgccggatttccacctatcaattcccgtcgaactgggagctgtcgtctgcaagagcggcgagtgtgatccagtattttaccgcgaatgaagacttttccgccaaacggtttatctctgccgggtatgcggatacgaaacctgtgaaggacaacaaaagtcccggacatatgaaagaaaaccgccgtgtagaaatcgtgatcaaaaaaacgacctcctcataaggtcgttttttattttgttttataccgctgctcagaccggatggcaaaaagtgctttttccacggtttgggcatttttttctgaaatttcttctttgcgtggaatcggaggatataattgttcaggatcactccaaaaagcgggcagcgtgcagggggaatgcttctgccatttatcaatccatttctgcggtatgcgctccccgggatcaatccctttcatctcaagccaaatgcggctccatgctctcgggacgactctccaaatatcgtatccgccgccgccgaccgcgatccatctgccgctgcaatattgatgggctaatgaatgagcgagccgcgggatctcctgataaatggagattgtattggacaggtgtgtcaatgggtcgtaataatgggcgtccgcaccgttttgggtaagaatcacatccggcttaaaaaaagccgcaatttcagaggcggccgttttgtaagcgtggagaaaggaatcgtcctctgtgaaagcgtccagcggaatgttaaaagaatagccgtagccttgcccgcttcctttttccagtacttgtcccgtcccgggaaataaataacgcccggtctcgtgaaaagaaacagtgcagacatcagacctgtcgtaaaacgtaaattgaacgccgtcgccgtggtgggcgtctgtatcaatgtataacacttttgccccgtagttcttctggatgtattggatggccacggcgctgtcattatagatacaaaagcctgacgccctgccgcggaagccgtggtgaaggcctcctcctaaattgcaggcatgcctggcttgtcccgtcatgacataatctgccgccgttaaggtgccgcccaccagaagcgacgcagcttcatgcatgccggcaaaaacgggggtgtcttccgttccgagaccgtagctttctccttctgcggcagggagccggcccgcacccgcaagttccaccgcctgtatataatcctccgtatgaacgagagccagctcttctttagtggccgtgcgcggtttgacgatgtctccatcgtcaaacgcgtccgccgcctgaagcagatcgtatgttaaaagcacgcgctgctgattgaacggatgatcctgatgaaattgatacgtctgataagaaggcgagtaaacaaaaacgctgtctctcatggctgatccctcaaatgtttcggccataagacattgtatccggcttcatgaacggcacggataaaagggagcggattcatcgtcttcacccggaagacgagaatgttcgacccggcggaatcatggggatagacgagcacactcaggatttgcagctgaagatcacggcacatgcagctgagatcagcaaggctttttgtcatatccgtcaccaggatttccacctgtgatcccggctgggccgcgcctgtcaggctgacgaaagtccggagcacgtcggttttcgttaaaatgcccgtcagcttatgatttaccgtaatcggcagacagccgatgccgtgctcataaaaggaagcggatatttcttccacaaagtcaagcggatgggcgcagatgacattccgcttcataatggtctccactttgtttgtcagaaacgcgccgcgttccttttgttcgaagctgccggggccggcctgtttaatgtctctgtctgtgacaataccggtgacgtgcagctcgtcgtcgatgacagggagatggcggatatgatataccttcattttacggacggctgtttcaatggagtcgtgttttgagacggtgatgacgtcccgtttcatgatttgttctgcaatcatctttttatcccctttgtatgtcagtcaatacataaaccgctgataaaaacgaagcctgtcgaactgttcaattgactcctgactgacgtgcctgccgatgcgggccatcagacaattggccggatgagagctgatttccggttcatccgttgcaaaccagacaagacccccggcattcatcatcttttccatgatctttctgtattcccacacatcttttttcattccttttaaatcccaatgccagtaatattccgtcgtcatgatgatgtagcgttccatctgttcatccatcatgctgactgtcagcaacgtttttccgacagaacagccctgtagccgggagcgacctcgatcgccccgagctcaaggagatcttccatattgccgtcagaccaccgttcaagcggatcaggatataaatacgtcacatagccgataatcgtctgtccgtccctggcgataatgatccgaccttcaggaagcccggcgatctcgattaacgctttgtgctgttcatgaggaaggcgaaaggctgtcaggccttcatgaaactcatactgtgctaggtcctttggaggaacgggcccttctaccaatagagggccggctgctgtctgaattgatgaagaatggtacgttttatgatgtttcactgattcaccgcctgtcggttcttaataaaaacacatctctcttaagcataacaaaatataaagcgttttcaatagtgttgtaatttatattttaaaaattgagaaaactgtgaacatctactataattagtctatagataagcaaagggggatgttgcatgaatttgaaagcgttgccggcggaaaaggggaattatcatctgcgaaattatgaggaaacgtaccgcagcttcgattggaaagaggtcgaagcggagttttcctggcatcagacggggaagctgaatgcggcgtacgaagcaattgaccgtcatgccgaatcatttcgaaaaaacaaagtagcgctgtattacaaggacgcaaatcggaatgaaaaatacacatttaaagaaatgatggaggaatcgaaccgggcgggaaatgtactgagacggtatggaaacgtggaaaaaggggaccgcgtttttattttcatgccgcgttcgccggagctgtactttatcatgctcggcgcaattaaaatcggtgcgatcgccggccctttatttgaagcgtttatggaaggcgccgtcaaagaccgcctgttgaacagccaggcaaaggttgtcgtgacgacacctgaactggccgaacggattccggcggacagcctgcccgacctcgagcatattttcattgtcggcggcagcaaagaagcgggagataaaatcattcattatgataaagcggctgagggagaaagcacgagacttgatattgaatggatggacagaagagacggctacctgcttcactacacatcaggatctaccggaacgcccaaaggtgtgctccacgttcatgaagccatgattcagcaataccagaccggcaagtgggtgcttgatcttaaagaagacgatatttattggtgcactgcggacccgggctgggtgaccgggacggtgtacgggatatttgcgccgtggctgaacggagcggcgaatgtgatcgtcggcggcagattcagtccggaaaactggtacggcacgattgagaagctcggtgtcagtgtctggtacagcgctccgacggctttcagaatgcttatgggcgccggagatgaaatggcatccaaatttgaccttacttcacttcgtcacgtcctgagtgtcggagaacctttgaaccccgaggtcatcaagtggggacataaagtattcggcaagcgcatccacgacacgtggtggatgacagaaacgggcggacagctcatctgcaattatccttgcatggagatcaagccgggctcaatggggaaaccgattccgggagtggaagcggcgatcgttgacaatcagggaaatgagcttccgccgtaccgaatgggaaatctcgccattaaaaagggctggccgtcgatgatggattccatttggaacaacaaagagaaatatgattcttattttatgccgggcggctggtatgtttccggagattctgcttatatggatgaagacggttatttttggttccaaggcagagtcgatgatgtcatcatgacatccggcgagcgcgtcggcccgtttgaagtcgaaagcaaacttgttgaacatccggcgattgccgaagccggcgtcatcggaaagccggaccctgtccggggagaaattattaaagcgtttatcgcgctcagagaagggcatgagccatccgatcagctgaaggaggacattcgcctctttgtaaaacaggggcttgccgcgcatgccgcaccgcgggaaattgaattcaaagataaacttccgaaaacacggagcggaaaaatcatgagacgtgtgctgaaggcatgggagctgaacctgccggcaggcgacctgtccacaatggaagattaaagacggcgttgacatcgtatcttatttatgttaaaaatgagtaagcttcatacgaaaaggttttgattgagacaagtaggatatctgattgttccagagagctgatggccggtgaaaatcagcacataagatatgccgaatacactcatgaaccgcttttgcgaacaaagctattccaaggctttcagtagtgaaagaacggacacggtccgttatcaaaaagagtgataaaagcttttttatgtttttattagtagggtggtaccgcgattatatcgtcccttcgttttaaacgaaggggcgttttttattttcataaacaaaggagcagacaaaatgactaacttattagaggatttatcattccgcggcttaatccagcaaatgacggatgaagaaggactgaataaacagctgagcgaagaaaaaatccgtttatactcagggtttgacccgacggctgacagcctgcacatcggacaccttctgccgatattgacactgcgccgtttccagcttgcaggccaccatccgattgcgcttgtaggcggcgcgacgggactgatcggcgatccgagcggcaaaaaagcggagcgtacgttaaatactcaggatatcgttgtcgaatggtcgcaaaaaattaaaaatcagctttcccgatttttagatttcgaggcaggagaaaaccccgctgtcatagcgaacaactttgattggatcggaaagctgagcatcattgaatttctccgtgacgtcggaaagaacttcggaattaactacatgcttgcgaaagatactgtaagctcaagaattgaaaccggaatttcttacacggaattcagctacatgatcctgcaatcctacgattttctgaatctgtacagagaaaagaactgcaaactccaaatcggaggcagtgaccagtggggcaacatcacggccggtcttgaactgatcagaaaatcagaagaagaaggggcgaaagctttcggtcttaccattccgctcgtcacaaaagctgacggcacgaaattcggcaaaacggaaggcggcgccatttggcttgataaagaaaaaacatcgccgtacgaattctaccagttctggatcaatactgatgaccgcgacgtcgtcaaatacttaaaatactttactttcttgtcaaaagaggaaattgaagcttatgctgaaaaaacggagacagctcctgagaaaagagaagcgcagaaacgtctcgctgaagaggtgacggttcttgtacacggccgtgaagcgcttgagcaggccgttcatatctcccaggcgctgttcagcggcaatattaaagagctttccgctcaagacgtcaaggtaggatttaaagatgtaccttcgtttgaaaaagaccgctctcaagaactgtctttagtagacgtgctagtggaatctaaactgtcgccttcaaaacggcaggcccgcgaagacattcaaaacggagctgtttacattaacggcgagcgccagacggacatcgggcatcttctgactgcggaagaccgcattgaagatcaatttaccgtactgcgccgcggaaagaaaaaatacttcctgatcacgtactgaaaataaaaagcagtccggccgctccatgcggcaggctgcttttttatgttttgtgaatactgcacggggaaatgagtacagtacatagtataagcaaaacagggaaggggtgctgcgccgtgaatttcatgtttaccatcgccaaagaaagattgcagcgggatcattgggaacagcagcaaagcataaacgccgaagccgaggaatcagagacggaagaagaaaatccgacatcataaaggtaaagcctccattctatggaatggaggcttttgattgtcaccatatcagcctgacggcggccatcagcacgactcccgtgatgaccgtgatggataagctttttgtcagcatcgcgcaaagcaatgtcgggatgagaacgatcattgctttccaatcaaaggtcaaagcgctgtttgttttcacaatcatgttttccgttaccagagccgtcaaaatgcaaagcggaataaaggagagccattttaaagccaattcaggcatctgaatgttccggacaaatataaacggaacaatgcgcggcacaagtgtaacaatcatgcagccgagtataatccagatcatttgtgtgctgatgctcatttgtccgtcaccaccccgatcgttgccacaattacggttgagacgatgaccgcgatgtgtgacgggacgaaatacgataacaagaccataaaaatgatcatatagagaattaaggagaggctgtgcttcagcttttccgaagcggacgactgcaattgcagcacaagcagcgccgcaaacatagcgggcaaagcaaagtccaggccgagagcgtaaggatcagatatccattgtccgagaagcccgcccatcacgcaggaaataacccagcacatgtaagcggttatattgaggccgttcatccacttatcgtataacctgccgttctgagccgctttgttcaccgctactccgaaagattcgtcagtaagcagagccccgaagccgatatttttcgccagagagtatttcgtgaaatacggcgcgatggtcaggctcagcagaaggtgacgcagattgacgataaacgtcgttaaaataatggcggaaatcggactcccggaaacaaggagcgagcaaataataaattgggcggcgccggcatagacacacaaggataacaaacagatttcaagaatgcttagatgagaggcaaccccgacgatgccgaaagcaaaaccgatgctcatatagcccagcagcgtaggcacacaatcccgcaccccctgtaaaaacgtatcgttcatttcccgggaaacggcggttttttgcacttctgtattaatcattttttatactcctttcatagagattataatgataacgactaatgaaaaaatcaaagaaaatacggttcacatttatatgaaccgatttccggtgacgacatgaaataacgaatggttttgtttcatcaggccttcaactttttcagccccgacttctttcacaagctctgcgaacatcagatcgtgcctcatatattccatggccacgagaacgagagcggggtcttctgatttaatggcccaggcattcgtctgcggagaaaaattggcgattaagacttctttattatctcgggcagctatcgttaatcttccgcccatccgtttctccgccacttcaggagacatattatgatttgtcgtatttccgagcttcacttccggagggccgaacacaatcgaaaagacgggcaattgttcggcggcgcgtttattagcggcttcttgaataaagggaatctgctgttcccagacagacagccacaactcttcctcggctttttcaatcatttccttcatctcattgatgacatgatcatttgtgctgatgcggcggatgacattcatctcctgctcgctttccagcgccaataacttttcctcaaggtagccgaatgagctctcgaaatcgtgccggagccggtcgattaattcctttccggccagcggggcatatgtaaccggatcagacggcacaatatggacagcgcctttatcaactaatttccccaatacctcatagatcattgagcgggggacgcctgaccttttgctgatttcatatccggtaacaggcgagtgtttcaacaagccgatatatgctttacattcatattgagaaaatccaaacttctgtaattctttcagaacatcatccataaacatcctccgtagtggttattcatgaaactactataatgtaagcggttatatcttgtcaatgggacttgagtgctgaaagaaaggttcgcctgttttgtcgctttccaacttagtttatgatgagttacatgtatggcttttgtgaaaaacgttgccgtagacccacacgaatgccgtttgatacgataaatacaagaagtcaaaaagaggaggatcacggtggaaaacacctctaaaatcgcttttttatcggttataagcaattccctggtcgtcatgctcaaaatagtggtggggataataaccggatctgtcgcgatactttcagaagccattcattcttttttagatttgatcgccgccttcatcgcctttatctccgtcaggatttcaaaaaagccggctgatacagggcatccgtacggtcatggaaaagtcgagaatctgtcggggaccatcgagacgatgctgatttttgcggcagggatttggatgatatatgaatgcgttcaaaaactggtcaacccggctccggttcatctgcccgtattgggaatcgttgtgatgcttgcgggggctctcattaatttgatcgtttcgaagttcgtaaaaagagaagccgaaaaggttaattccgtggcaatgaaatcgaatgccctgcatttactgactgacgtgtacacatcattaggcgtagcggcaagccttttggtcgttaccttaacggagtggtacatacttgatcctattataggtatggtgctggcggtgtatatcatatatgaagcgtttaagttaatgaaagaagcattcccgccgctgattgatacccgtttgtcggaagaggaagaaaaaacaattttaaagattatcgaaacatttcaacaggaatttattgaaattcacgattttcgtacaagacgctccggcccgcaggagtatattgattttcacttggtcgtagcctctcacgtggcgattaaagacgtgcacgacctgtgtgaccgcattgaaagagctattacgaatgaattcaaacaagcacaggtaatgattcaccccgagccggagagcgagaggaagaaataaatcgatcttaagtttgcgtttgttccctgcaaaatgcctgcaaaaggcccgtttccacgggtctttttgttgtataaatgactatttctcgctcatatgagagagaagcttatacacgtgaggggtacatttcatacgttatgttgtaaagaaaaagggaggtgaacagaattgaacgctatttctgttaaagaaattgaacatggagttgccgttgcggaaagagaaggtttaggggagtatttataccaagaaccggtttccaaaaaatgttcgcgccgttcccgcagcagaaaacggacacaccgttcccgcagcagaagacggagtcatcaccggacacaccgctcccgcagcagaagacggacccatcaccggacacaccgttcccgcagcagaagacggacgcatcaccggacacaccgttcccgcagcagaagacggacgcatcgccggacacaccgttcccgcagcagacggtcacatcaaaaacgtacccgcaagcgctgttttaaatgctgaagcagactctattacaagtaatggagatctgctataatggcaagagaactgcataaaagatccggtatcatcatctgcggacactgaactgacaacatggcgctgtttgttcgtgtccgttttttatgtcaaaaaagatgccggaggataaaaaggaagggatgacgccgaatgaagctgaatgaggaattttataactctgaaggaaagacagtctcttcgcaaaacataagcagcaagcttttgcatatcacggacagcgggcatatcagcattgacttcatcagcataagcaggctgcggaaggcttcaaaaatcgcgatcttaggtgacagcgtcgcccgggggctgcgcgcggaatacggctttggtgacattctgaaagaccggacagacgctgaaataaccaatctgtctgtcagcggcgttaatatgagcaaccacggaagcgataacatttatcagcaagcgcttaaaacaaagggacatgatgtcatcattgtccagggaacagatgatgattggtgcaaccacattcccatcggcacagatgaaaaggatatcaccacattttacggaggcttctgtcaagtgattcagcagctgcgaagcggaaataaaggcgcgagcaccattgtggtgaccccaacgagacaagcaaaaatatcaaaaggaaaaatcgtccgccgtgatactgataaaaataaactgggcctgaagctggctgactatgtgaaagcccaaaaagaagcctgcacactcctctctgtaccgtatgccgacctgtttgatacagatctcatcgacccgtataatcccgctttccgcagcatgtgcatgtcagaaggtcttcatccgaacgagaaagggcatcaaatcatttttcaggaaatctgccggaattattattactattacgggtaacacagcgctgcatgattattttcggccttgcttttctaaaagctcaattattctttgagatgcgtgtttttgcgctctcaaaagcgaaatgatattaccggtaaaaccgattaaaatgatcagcagcaaaatgatcatccacataagtgaacctcccgtcgagtgttgaaaaacccactctttattttacttattatggatggggaagagaataggtctaactattggtgtttctttatcaatccataaaaaaatgcacagactgaacgggtctgtgcatttttattcgcttatttcagcaggttcaatgattcacgattaaaggcttccaaatcgtcaggcgttctgctcgttacgatgttatggctcacgatgacttcttcatctttataatgtgcgccggcattgattaagtctttgcggatgctgcggaatcccgtgatatcttttcctttaagaaggtcggtatcaatcagcagctgcgggccgtggcagatcgcgaaaacgggtttctgattttccacgaatgatttagtgaattcacccgggcggtcatctccccgcagaagatctggtgaaaagcctccgggaatcaataacgcatcgaattccttggggtctgcgtctgagatcgcttgatcgatctttactttctcaccgtgcttgcccgtcacttctttccctgcttctaaatctattgtcaccacactgtggcccgcttctttaaatgcttccgccgggcttgtatattcaatatcctcaaattgatctgtcatcagaactgcgatttttttgctcatcatcatgcctcctgtgaatttgtatatgacaagaatatcaggcggattgccgcctcacaacgtatttgcttgaagatacggcatgaaaaaagacccctctgaaaaagaggagccaaaaggtacggaggtctgctgaggcaagaaatcgaaccaattactttttgcgtctttttttatcctttttacacccgcatttccccggatcgcccggatcaatgacttcgtgaattgtttcttcctgataaacgtggcggggaacataacggatatgttctctgttaatgtgtttgatgggatggacgtaaaccacttctttgtcagtatacttgtcagtcacaatatacttagggtcacagtaatacactttcgattttttacccattcatctcacctcccgtactttattaaatgctgaaaaggaggattttgcatcggacaagtacactatggcaagtccacaattttccatccgcaatttcgtttatctggtttttcctgaatccgtctcaaattggaatggctaaccctttttgaacggggaaatctataaaaaagaattcaaaaacgattcttttttcaggtcaatcgagatgcatacatctttagggggatttcagaatgctcgatgaaaaaacgattgaaatcattaaaagcacagtgccggtcttagaagagcatggtgaagaaatcacaggccgattttatgacctgctttttcagcatcaccctgagctgctgaatatctttaatcagacgaatcaaaagaaaaaaacacagcgtacggccttgtcgaatgctgtgattgcggccgcagccaatattgaccggctggaaaacatagtccccgtcgtcaaacaaatcagccataagcaccggagtatcggtgttaagcccgagcattatccaatcgttggaaagtacttgttaatcgcgataaaggatgtgctaaaagacggggctgctcctgaggtcattcaggcatgggaaaaagcatacggcgtcattgcagacgcttttatcggaattgagaaggacatgtataaacaagcggaaacgcaaaaaggcggctggaaagacgataaggcgtttaaaattgataaaaaggtaaaagaaagcaaagagataacgtcgttttatttaaaaccggaagacggacaagttctccccgaattcaaagcgggacagtatatcagtgtaaaagtatacattccggacacgggttatacgcatatccgccagtacagtttgtcggatgtatccggtaaggattattaccggatttccgtgaaaaaagacggaattgtttcttcatatctgcatgaccaattacacgaaaaggattcaattgagatcagcgctccggccggggatttcgtattagaccctgattccaaaaagaatctggttctcatcagtgccggtgtcggaattaccccgatgatcagcatgttaaagacggttgccaaaacccagccgcagcgaaacgttctctttatccatgcggcaaggagcggagagtatcatgcgctgcggcatgaagctgaagaagccgcggaacactcatccgctgacaccgtctttatttacagcgaaccgtccgaacaagaccgttcagaaaacattcgttttcgggaaggccggattgacaaacagctgttagaagaagtgatgacagataaagatgctgatttttacctgtgcggatccccgtcgttcattaaagaaatgaaaaagctgatttctgaattcaatataacgccggaatccattcactatgaattatttaaaccgcagctgagtatggtgtgatgtaacaacatcttagacagtctgtttaacagactgtctttatatgtttaatacgaaaggttttccccataacatagaattttcaagcaggtaaatcatattcaaagtcgtattatcctaaaaagacaaagttttttatgtcccaacatacttcagtagccggatggaaaggttctcttcctgatacttcaactggaacattggctcctgctcttgtgaataaaatagcaatgctctaataataagaggtggctcaatggcagtttttgttgaaaaaacgctccaaggtctaaaagaattaattgatgaaaaaggccgcttgaacattttagggaatgaaggaacgcttttagaaacagaatgtactttctttaaaggtgcaacagatctggagattgagagttttgagaagaaaataaaagtctcacttcctgaagattataaaacctttttaaaattgcataacggagccagaatatttgatttgttgatttacggtgagaatgtaggtgggggtttgcatattcttgatttagaagagattgaaaagtatatgcaaaatggttttttagagcctcagtttattcctgtcgcacatctgttagacggatgttatttgttaattgacaaaaccaaaatttctacagatccaaactatttatggttccgcggatttattgagtatgaaccaatgaaacttaattttgagatatttttagatcggtatattttgtgtcaaggagcaaatttttgggagtggaatatctataccgctgaaaattattataggactcaccagggtgataaggattaacctttcctacagttgggttggttcatttttgcggttagacttcgatttgaacttttaaaaataggtttaatttgggagacgaaccgattaattggtgtatagatgatttataaaaagcgcagatactctgcgcttttttatttaagtattttccggatcattcgcagcccgtttttggaagaaggataacggaaagcgaggtcgaagcggttcgtttgtttgacgacgctttttttgtgcgtaaatgcgttaaagctgttaaatccgtgatagctgccgatgccgctttctccgacgccgccgaatggcaaatacggtgtcgcgacgtgcattaacgtatcattgacacagccgccgccaaatgacagattctctaaaacagttcgctcgattcctttgtttgttgtgaagacataaagagcgagcggctttgggcgtgattggactttctcgatgacttcatcgatatcgccgtatgtaaacagcggaagaatcggcccgaaaatctcctcctgcattactggagagtcatccttcacttgatctagaatcgtcggcgctattttgtggtgttcaggattaaattgtccgcctgtaagcgggacgccatcattcagaaagctgagcagccgctgatagtggcgttcactgacgattttgccgtactgcggattttgttcaggctgagggccgtaaaattcactgatcgcatgcttcatttcttctatgagcttcgttttgatatcttggtggacaactaaataatccggtgcgatgcaggtttgccctgcatttgtaaatttcccgaagacgatgcgtttggcggcaagctgtatatcagcatccttatggacaatgcagggacttttgccgccgagctccaaggtaacgggaattaattgtttggaggcggcctccataacgatttttcccacggcaacgcttcctgtgaagaaaatatagtcaaagggctgctgtaataaaacagtgctgacgtcgggcccgccctccgccatagcgacataatcactcggaaaaacgctgctgataagtttagaaagaacagcggaaaccgcaggcgtatattctgacggtttgagaacgactgtgtttccggccgcaatggctccaatcaagggtgaaagcgccagctgcaagggataattccaaggcgcaatcaccaaaacgattccatatggctcagggataatcatgcttttcgagcccaggtgagtcagaggcgttttgactcgcttcggtttgacccattttctcagccgcttcatcacaaaactgatttcttccagaacaattccgatttctgtcgtgtacgcctcctgttcggatttgtggagatcctgatagagagcggctgctatatcggcttcttgtgttttgatggcttgtttcagcttttgcaatatgttcagccttgattctagcggtctcgtatgccccgccgcaaaataggctttgtgcttgctgacgatagaggggatgctgttcattccgtctctcctttttgtaagtatgatgattcattatgtaaaaaatcgcttctgcctgtcaaatgattaaggtgagtcagaaaaaataacaaactcatttctgcgtttcggcaggaatttgatgaaaaagagaattctttttgcggcattatctgttgcaggcattatggggttttctaatgtacatgtagttgaaaagccggttggcacataaaaaaaagccccggacaggggcttttttaataaagagagggaacagcccaaaagaaaaaccccggaaacattgtcatcacaacatgtccggggtttaatccaatgctctttaaagagcgttttacttaacgggagtagaactcaacgataagcgcttcgttaatttccggagcaagctcagagcgctctggaagacgagtgaatgtaccttcaagcttttcagcgtcgaaagtaaggtactcaggaacgaagttgtttacttctacagattctttgatgatagaaaggtttcttgatttttcgcgaacaccgattgtttgaccaggttttacttggtaagacggaatgtcaacgcggcttccgtcaacaaggatgtgaccgtggttaactaattggcgagcttgacggcgagtgcgtgcaagaccgagcttgtacacaacgttatcaagacgtgcatctaaaagaatcatgaagttttcgccgtgtttaccagtcatttttgccgctttgtcaaacaatgtgcggaattgacgttcgtttacaccgtacatgtgacgaagtttttgcttttcttgcaattgcaaaccgtattctgatagttttttacgctgtcccggaccgtggggacctggtgcgtaagggcgtttttctaattctttacctgtaccgctaagagagattcctaaacggcgggacagtttccaagatggacctgtatagcgagccataatgtgactcctcctttggttttattttgtggaaaataaaaaccgtctgttcgatccgaccgtgcacattttgttttcatgtatcctcgctccagcagcagagagttacacgatacaccttacagctaaggaacaaaatgcaaacacagaagctgaacaaaaaggctgcaatatttcacacaaagaacattatatgatttttccccgccgccgtcaaccatttctccatgaagagtgccggtttatgatataatgtacaaaaatgagtagtacatgtttaggtgataaaaatgaaaaaacaaacaattgatgaagtgacggcctttcatcagaaaatgctttcttttttcttaacgaaatctgaatccgtctcattatccgactcgctgttatggctggcctcagctctagaatcctgctttacatctctttcattgaccctttcaccggcagaatcaacacgtttcaccataaaaacagaagatgaaccgcattatgctccgctgaaagagagtgacggccgttttatgatcaggaatcagacgtccggcagatccttttatctgcgctcggaaggcgggctgccgatcccggaatcattgcctgagatcgttactcagtttatcaatcaatctgtgagacaaagcgggctgtttgacaaaacgaagcatcagcggaaaattcacagaatgacagaaatgttccattcgcttttggatcaaaatgaggttttggaaaaactgcaggcaagtttgagtacggctttccggtctttccgcttttcactgtttatcacgcaggatcaggatacggacagacagcttcccgcaaaagaattacatatggatggaaaagatgccgatccgtctgccctgaaggtttatttatcggggagactgctcagaaaaggcaggtcatctgcttacctgccgatcaaaggccagcaggggacttacggggttctgaagacggaggggctgcaggatgccgttctttcgtgcagtactctcagtgaaatgctgctgcttgcgggcgcggcgggaaaagcatttgaaaatgcgcagctctatgagcaatcgaaaaaaagcattgcgaatctggagctcattaatgaaacatcgcgccagctgaatcagcgcctcagactcactgacacgatgcgggaactcgccgccattatgacccaatcatttcatgcggaagaagtggctttttttcatattgatcattttgagacgcaaaatctgcttccgggacataccgctttttttaagacagaacgtgcgaacccctatatcagcattgtgaaagaaaagctgttcgagggagaaaagggcgtgtttatcggcagcggaaagactgtattcggcgaaaacggcttcggctcgctgatggcggtgccgatgatcgaaaatgacaccgtcttcgggttcgcgattttattgaaaaaggatttgtatgcttttacgtttgaaatgtataagctttttcaagcgctcattcaccatgcgacattggcggtcacgaactccatgctgcgcgacaggcttgagcatcttgttcagacagaccagctgacggagctgtattcaagaacctatttggatgagaaaattcaatacagcatgaaaattcataaacggggtgtattcatcctcgttgatatcgataatttcaaaaccattaatgatacatacggtcatcaaacgggagattcgatcctgattcaggtggcctccgttatgaaaaaccatattcgtgagcatgatgtcgctgcaaggtggggggcgaggagctggctgtctatctgccgaatatcaacgtgtcatccggagaacgcatcgctaaaaggctggttcgcgccatccgggaaaacaccgagccgcgcgtgacgatttcctgcggcgtttcctgctggtcaaagacaggcccgatgccgttgaaaatgctcgttcagcaagcggacgaggcgctttatatcgccaaacggaacggcaaaaaccggctgatcatccaccaaaacagcacgacgacataaaaaaggagccggcctgccggccgggctcctttttttatcctaatcgtttttcaagcgtttcaacaaactttgctaaataggcttcgtccgtttcatcaaaacggtttttcacagggctgtcaatgtccagcacaccgatcacttcaccgtttacgcggatcgggaggacgatttctgactgggaagccgcgtcacaggcgatatgtcccgggaacgcattcacatcggcaatccgctgcacggcgccgttagagtaggcagtgccgcatacgcctctgccgaacgggatgcgcacacaggcaggaagtccttgaaacggtccgagcacgagctcgccctctttagcgaagtaaaaccccgcccagttgacttcatgtaatgaatggtataaaagcgctgatgcattcgcgtaatttgcgatcgcatccgtttcatcttctgtcatggcttcgagctgtttaagcagaagctgataacttttttctttatctccggattgtttttcgacatgaaacatggaaaaccctcactttttctataatatcaaacaaagttccggccgttctgccggcatttgtcgagaagttcttacaggaacggcgcctttctgcttgaattgttacacataaaggggtgagccgtatgaaagtaagcaccaaagacaaaattattaacgccgctgtccagctgtttaaccaaaaaggttattccggcacgtccgtccgtgaaatcgcaaagtcagctgatgttaatgttgcgcacatctcctactattttaaagggaaaggcggattaatggaacatttagtttccgagttttacgaaggctatactgaagcgctggaaaaagccgccgtcagtttgaacggtgaagacgcgcaggaacgcatcctgcgggtgattttcgatattttatcctatcagcacgataaccgtcaactaacgcggtttgtgtaccgggaagtgacgattgattccgtgcttatcagggaaattatgtctacttacttaatgaaagaaaaatatattttccagctggtgattgaagaagggcagtcacgccacagacggctgacgctgcccgtgccgcattttattctgcaattgaaatccctcttgatgatgccgtatcttcagcctcaatacattacagaggtgctctatatgcagcctcatgaaccgtacttttataaaaggtattttgaagaggtgaagatctggatcgaaagcgtgttccgacggcctgatgcggcgcttatgaagtaatgatgcttttgtacgtttcataggaactgccgacatcttccgcttgatgggcgtccgacccgaatatgagcgggatttttttttgcttcgcggtctcagccatccaatcctccatgtatacttccccggcaaacttctttctgagcccggatgtattcacatccagctccattccgtgttctttcacggcgtcaagacagcgggccgcaagctctcttatttgaggtgacatgctgtaagggaaaaggcgtgcgaattttttgacgagcgtgatatggccgacccgttttggcttaaaggggccgagcggtgttacaatggaagaatacacagtttcatagtattgttcatatacggcttcaacgcttccgaagtgcgcggcgagctgctgaaaggcgtgctcgtcaaaatcgaggcagatataagacggaccggtcttcaaaaaatgaacggataaaatgccgtcatccagtgaggggccgtacgtgttcagaaacgccgcggtttcctcttcataccctgtgataaaatcagtttcgagcccggtcagaatgctgatttgtccatcgtattcctttttcagctgtgacagccgctccaaataaacctccatctgtctgagatccatcgcgctgtcctgaagcggtacgggatcttgaaatgacggaggaaggggggcgtgctctgtaaatgtgatcgagtcaaagcctctttccagggccttttcgacatattctttcagcgcatccttcgagccgtgagggcaaaaaggcgtgtggatatgagcgtctcgtttttccatttgtgtcactccattaaaaaattgcagaatcctgccgaaattatgcaaaaagtttttgatttctggtcaaaaaatgttggttacatggtatcataataacaatgaaaacgacagattttctcaatacatatattgaaatctttctgaatacataaaacaccctgacagattaagagaacaacaaggggctcattatggagttagtcatcggattattggttatactgctcgcgctctttgcggcgggctactttttcaggaaaaaaatttatacggaaattgaccggctggagtcatggaagattgaaattttaaaccgttcgatagtggaagaaatgtccaagatcaaacatctgaaaatgaccggagagacggaagagttctttgaaagatggcgcgaagagtgggatgaaattgtcacagcccatctgccgaaagtagaagagctcctttatgatgccgaagagaacgccgacaaataccggtttaaaaaagcgaatcaggtgcttgtccacatcgacgacctcctcactgcagccgaatcaaatatagaaggcatactgcgtgagatcagcgatcttgtgacgagcgaggaaaaaagccgcggagagattgaacaggtgcgtgagcggtattcaaaagcgcgaaaaaaccttctggcgtatagccatctctacggagagctatataacagcctggagacggatctcgacgaaatctggagcggcataaaaaagttcgaagaagagacggaaagcggcaattacatcaaagcgagaaaagtgctgcttgaacaggaccgcagactggatcagcttcaaacatacatagatgacgttccgaaactgctcgctgactgtaaacagaccgtgcctaaccaaattgccaagctgaaagacggctaccgggaaatgacggaaaaaggctacaaattggagcatattcaaatcgaaaaagagctggagacactcaccaatcaattgaaacgggccgaaagcgcgcttttggaagaattagatgtcgacgaagcgtccgccattcttcagctgattgatgaaaccattcaatcgatgtatgaacagctggaaggcgaagtggaagccggacagtccgtattaagcaaaatgcctgagctgatcatcgcgtatgagaagcttgaggaagaaaaagaccgcacaaaaaccgaaacggagctcgtcaaggaaagctatcagctgacggcgggagaaatcggcagacagcatgctttcgaaaaacagctggaaacgatcggccggctccttgagcaggcgagagaaaagcttgacggtgagcatgtcgcttactcgctgctgattgaagaagtcgaggccatcgaaaagcagatggaagaagctcagaaagaacatgccgaataccgtgaaaatctgcaggcgctcagaaaagaagaactgcaggcgcgggaaacgctgatgaatcttcggaaaaccatttctgacacggcccgaatgctgcaaaaaagcaacgtgccgggaattcctgaacaagtcaaggacaagctcgagacggcaaatcatcatatagaagagaccgtcagccaattggaagagctgccgttaaacatggaggaagccgccaaacatctgaccgaagctgaaaaggtggttgcggaagtcagcgaagaggcggaagaacttgtgattcaggtgaagctgattgagcggatcattcagtacggcaaccgtttccgaagccagaatcatattttatccgaacagctgaaagaagcggaacggctgttttacgcttacagctataatgaagcttatgagatggcggcagatgctgttgaaaaagcagctcccggcgccgtgaaaaaaattaaagctgatcaatctgcttcatagacgcacaagcaaaaactgcaccctgatggaaatcagaggtgcagtttttttgtttctcacggaatataaaaagcgcctatggctgatatacatcaaaccgcaggcgctgaatgttacgattttgctttatttaattcgatgggcgggctgataaaaaacgtgatgatgcagccgatgatcgctccggcaatgcccggaagcacccagccgattcccatgctgtaaagcggaagatttgcgtttaagaatgaatctaatgatccgagcggaatgccggctgccttcaaaccgtccaggatactgaacagccccgttccgatcaggcaggcgatatagacttcgcgtctttccttaaagattttatcaataaaggaaagtacgataatgacaatcgccagcgggtaaatggctgataaaataggaactgaaaatgcaataatctcagcaagtccgaaatttgaaatcgccagactgaacagcgtgacaatcgtaaccaccattttgtatgataaagcgggaatcaattttgaaaaatattcgccgcaagatgtgacaagcccgatgcttgtcgttaaacacgcaacggtgatggcggcaccgagaacaatgtttcccagtgaaccgaacaggtaatcagatgaagctgataaaatctttgcgccttcgccgagcggcccgacagcgtccgtgcttgtcgctcccaaataggccaaagataaataaatgaatgtcaaacccgccgctgcaatcagacccgctttaatacaagcggcggcgagcgctttacgctgggtgacgcccctgcttttaacagcgttgacgacaacgacgccgaagacgattgaggcgagcgcatccattgttttatagccttccaaaaatcctttgaacaccggcgttccggaatatgcctgatgtacggcgcccagcccgcccatcggagtgacgatggcttttacgacaatgattaaaataataccgaatttaatgggagtcaaaatctttccgactctgtccacgattttggacgggttaagagctaaataatacgtaatagaaaaaaagatcaacgtgaaaacaaataaagataatctttccggaatgccgcttaaaaacggaactgcaccgatttcatatgaaacggttccggttctcggaatcgcgaaaagcggcccgattgataaataaagcacaacggtgaaaatagtgccgaataccgggtgagccttatcggcaagtcctttcgcgtctttgcccgttaatgcgatggcgataatacctaaaagcggcagtcctacgccggtcagtaagaaaccgcccatcgctttccagacattatgccccgccgcttgcccaagctccggcggatatatcatatttcctgccccgaaaaaagtgcgaagagcatgaaaccgataataacggtatctttgacaggtagtgagtgtttcataaaagtcctcctaaatactatgttgaaatattctgtcaattaattgtcagataatataacaaaacgaacattacttattatatggcaatgtacagagaagtcaatactcgatttattgcgaatttctatttacttttgttatggtagcataaatatcatacgatgtaccgttttcataaaaggagtaaaaaaaatgatatatttagacaacagctcaacgaccgagccgtatgaagaggttttggaagtgtataaacagacgagcagccgttatttcggcaatccttcgtctctgcaccagttaggaactgagacggagcagctccttgaagcggccgctcagcaaataaaaagaaccttacgtttaaaaaattatgatattgtatttacatcaggcgcgactgaagcgaataacgctgcgttaaagggagcggcctgggcaaacatgagtaaaggaagacatatcattgcttcggcgattgagcatccttctgtgacggagacgcttgatcagctgacagagctgttcggctttgaagtcacatatcttccggccgatcaaaacggcttcgtttctttgaaagacgtcaaatcggctatcaggccggatacgataatcgtcagcgtcatgcatgtcaataacgaagtcggctccattcagcccgtaaaggaaatcggcgggtttttgaagcagcaccggaatattctgtttcatgttgatcatgtgcagggcattcataaagttcctctgtctatagaagaagcgggcattgacctttgcactgtttcagggcataagtttcacggcttaaaagggaccggagcgcttatcgtcaaaaaaggaacgcggctcattccgcttataacgggcggctcgcagcaaaaaggcgtccgggccggaacagaacatacggcaggcgccgtttcccttgcgaaagcgatcaatctttccgcgcgtgacatgaatgagcggctttcttccgtggaggctgccaagaatgcgctcatggaaaggctgagcggggcggacggggtcgtcatcaacactcccgccgaaaacagcgctccgcatatcattaatttttccgttccgggcgtgaaggccgaagtgctgctgcacatgcttgaggaaaaaggaatatatgtctccacaaccgcggcatgttcggcaagagagcataaaccgagccgtgttcttctgcaaatgaataaaggcgaacaggttgcatcaagcagcatcagagtcagcctgaacttcatgcatacggctgacatcacggagccgtttatggccgcgctggtgccggctgttcaaaaactaaaaaaaatgatgaggtagcatatgaattacgatcatattttaatccgttttggtgaaatatccacaaaaggaaaaaacagacgcagttttattgaaagattaaaacaaaatatccgcctggtattaaaggattataaaaaagtaaaatacttttcaaaccgggaccggatgtcaattacacttaatggagaaaacccggagggaatttgttccttattaaagaatatattcggcattcaaagtttcagtctcgcaattaaatgcgaaagcaagctggaagacattaaaaaaacggctttagccgcgatagaaggcgaatataaaccggggaatacgtttaaggtcgagaccaaacgggcttacaagcagtttgaattagatacgaatgcgatgaacgctgaaatcggcggccatattttgaaaaacacggatggattaaccgtcgatgtgaaaaatcccgatattccgcttcggattgaaatcagggaggaagcgacattcctgaccattcgtaacgaaaaaggcgccggaggccttcctgtcggttccgcgggtaaagcgatgctgatgctttccggcggttttgacagtccggtcgccggtttttacgcgatgaaacggggattatcagttgaagccgtacatttcttcagtccgccgtatacgagcgaacgggcaaagcagaaagtcatggatctcgcgggatgcctcgcgaagttcggcggcagtatgacgcttcatatcgtgccgtttacaaagacgcaggaactcatccaaaaacaaatcccggaaaactatacgatgacggcgacgcggcgtcttatgctgcaaatcgcggacagaatcagagaagaacgaaaagcgctcgcgatcattacgggggaaagcctcgggcaggtagcgagccagacgcttgaaagcatgtatgcgatcaatgccgtgacggcaacaccggttttgcgccctttaatcggaatggacaaaacagaaatcatcgagaaatcaaaagaaatcggcacttatgaaacaagcattcagccgtttgaggattgctgcaccatctttacgccgccaagtccgaaaacgcgtccgaaaaaagaaaaaatcgagcacttcgaaagcttcgttgattttgaaccgctgattgcagaggccgctgccggcatcgaaaccatcactgtttactcagagcaggaagctcacgataagtttgccggcctgttttaaaactgtatacaattaccaaagtttttttgaatgaagacatgtgttttatcacattctatactcacaaggaggtgatacacatgtcacaacaatcaaacagcggaaacagcaaccagcttttagtgccaggcgctgctcaagctatcgaccaaatgaagtatgaaatcgcttctgaattcggtgtaaaccttggaccggaaacaacttctcgcgccaacggttctgtcggtggagaaatcacaaaacgtcttgtctcttttgctcagcaaagcatgggcggaagcagccagcagcagttttaatcacaacttcacataatggctaagagagcggggaattccccgctcttttttcatgagtatagatagaaggctggaagcaatttatgcatatttttattgtaatggcctatgtttatgtataatggggaaagaaagtgaggagttgttcgtgttaaaacgagaagatttaatcgccccaaagaactataatcttgtaaatgaaatcgaaaagttcagccgttccaaagagaagaacgcgcttatttgggaagatcaaacaggcggcaagaaagtctggacgtatgaaaaattgatggaagaaacgaataaaatcggagcccgcctgaaaggtctcggatttgaaaaaggcgataagctgattgtcatggttccgagagtgcttgaagcgtatgccgtttatttagcgatcttaaaagcggggatggtcgtcattccttgctcggaaatgctgcgcgccaaagaccttgaataccggatcaaacacgccgaagtgaaaggcgctatcgtttatccttcatttataaacgcatttgacgaggtgaataccgagcagctggtgacattgtcaatcggtgaaaatgatgccggctggaaaaacctcttaacgattgaagcggacggaaacagttttcaaacagctgatacaacaagagaggacatggcgtttttgtcctatacttcaggcacgaccggccagcctaaaggcgttgtacatacacacggctgggcctttgcccatttaaaaacatcagccggtgcatggctggatatttccgaagacgatacagtgtgggccaccgcggcgcccggttggcagaaatgggtgtggagcccgctgctcgccgttctgggaagcggcgcgacaggattcatttatcacggcagattcaacgccaagacgtatttagagctgctggagcgccatcaagtaaatgtcttctgctgtaccccgacggaataccgcctgatggcaaaagtggaggagttggacaaatatgatctttctgcccttcacagcgcagtttctgcgggtgagccattaaaccgggaagtcattgacgtattccggaagcatttcggtattaaagtgagagacggatacggccaaacggagagcaccctgttagtcggcgtcctgaaggatatggatattaagccgggaagcatgggcaaaccgacccccggaaatcaagtagagattataaacgataagggcgaaatatgcgaaacaggcgaaacgggcgatatcgccgtgcatttgagcacaccggccttattcaaggaatattataaagatcccgaaagaacgaaaaagcagattcgcggagattattttcttacaggagaccgcgcgaaaaaagacgaggacggctacttttggtttgagagccgcaatgatgacattatcgtcagctccggatatacaatcggaccttttgaagtagaggacgcgctcgtgaagcatccggaagtgaaagaatgtgcagtcgtggcaagcccggatgaaatcagaggttcaatcgtaaaagcttatgtcgttttacaagacgatgaaaagcggagtgacgaacttgtcaaagaactgcaaaaccacgtaaaaacgattacggcgccttacaaatatccgagagagattgaatttgtcgaaagcctgccgaaaacggcgtccgcaaaaatcagacgtgtggaactgagacagcgtgaagaacggctgaaggctgataaaaaagcataatacaggataaagggtgagcggggatgaaagcgatttggcacggcggcaccatctatacaatgcttgacaagaatcatgtcactgaatccgtttataccgaagaaggcgtcgtcaggaagacgggcagctatcgggagctccaaggaacatacggttcgcctgatacggaggaaatcgatttacatggagctgtcatgttcccggggtttacggacagtcatatgcatttaatcggacacggggaaaaacagcttcgcctcgatttgtcgcagctgacgtcaaaagaagcgatcctgcgggccgcaaaagaagcagagcgtgaattggaagatggcgaatggctgatcggcgaaggctgggatgaaaacctgtttgaacggccggattacgtcacgaagcatgaccttgacccgctctttcccgaccgccccgtcctgctgaagcgggtatgccggcacgccgttgcggttaattcggccgcattgcgcgcggcggggattacaaacgaaacatctgatccaaacggcgggattatcgtccgggacggcaccggtccgacaggccttctgctggataaagcccaagagcttgtgacacaggccctgccgcccgtctcacttcactatgtcaaacgcgcgcttcaaacggcgattacggactgctggtcaaaaggcctgacaggcgggcattcagaagatctggcatactacggagacgcgtccgttcccgttgccgcgtacgagtctttaaccggcagcggcctttatccttttcgcgcccatctgctcgttcatcacgaagccgtcgacagctggagcgctctggataaatcgaccggaccttacctggaatacggagcgatgaaaatttttgctgacggcgcgctcggaggcagaaccgctctgttgaaaaagccttatcatgatgatccgtcagtttccggcgttcaggtgcacgatgacgagacccttgccgctcttgtttataaagcgagagagaaagggatggagatcgccgtgcacgcgattggcgaccttgcatttgaaaaggtgctcgatgttatcgaaagatacccggcaaagcccggacagctagacaggctcattcatgcgcaagtattagatgccggattgattgaaagagccgcccggctgccgatcggacttgatcttcagccgcattttgtggccagtgattttccgtgggtgattgaccggctcggagaagagcggatgaaaacggctttcgcctggaaaacactgctgtcaaaagggctgctgtgcgccggaggctcagacgccccgattgagccggccgatccgcttctgggcattcaatcggctgtgctccgtacaagcaagcagcatccggaaggtccggcctattatgaaaaagagtgcctgaccgtgtacgaagccattcagctttacacggagggaagcgcggccatcatccataaagaacatagccgcggacggatcgcccccggctatgatgccgactttaccgtactcagcggtgatccgttcgggacggatccgaaaaagcttcatgaattggaagctgtcaaaaccgtcgtcggcggccgtatcgtatatgaaaaagaggacaggcagtgatgcccgtcctctttttttatgataaaaatgatcgctttactttttcccagaaagagttgtctttcagtttcaccgttttgatttttttatcggatagtgtaatctcaacctttttgacattccgcgtgctgagcgcttcattatcaagcccgataatcggatgctcattgccgtcctggaccacctgcagtgtcagcttccggtctgagcttaaaataaacggagatccgagtgtacggtatgtgttgttgttcaacgacgccagttcggatacctgcatgcaggaaatcaaaggatcaacaacggcgcctgaaacagatttattgtaggcggtgctgcccgtcggggtggaaatgatcatcccgtctcctctgaacgtctcaaaatgaagatcatcaattaacacatccatcacaaacgttttaataatgcttgaacggatggaaacctcgtttaaacagtgaaaatgattgctgccgtccaccgttacatgaatgagcgggtattttctgacctcaagctgttccgcggtcatgctggccgccattttttcaggctcatcgctgtgaaaatcacagtacaaatgggctttcccttttttagcgatgccgacatacaggcagtcatcacggaatccggtttttctgacggcttgcagaaatgagccgtcgctgccgatgctggcgataattccggcatcctccgggtgagccgcaactgtaaaaccgtgcgattcagcaagctgcttcaaagagctgacttgttcttttgtttcgttgttttgtttgtgaaaaaaataaacattgcggcgaagatcggtcatatccccattcccctttgctgtcatatttacgtttttctcccagcaggtattgtgttaaaatacctgtggcaatagtgtaacatgtttcctgtttatccgttaagagaaagcgcttcatgaaaaaaatgaatctttttttacgggggaacgtacgaatattgacagaaaaggaggagaacaaatgaatgcaaaaagatggattgcgctcgtcatcgcgctcggcattttcggcgtatcggtcattgcaagtgtgaccgtcggggtgctgaagaatatcggagatacagggtctgactttgcatcactgacagatgacacagaggaagtgacgctggataagggcagccccggcagtaaaatcgccgtgcttgaagtggacggcacgattgaggataacggcgggtccgctggcctgctcagctcaggcgggtatgatcacagatcatttttaaaacaggttgagcgtgcgaaagaagataaaagcgtcaaaggaattgtactgaaaatcaattccccgggcggaggcgtgtacgaaagcgcggaaatacataaaaaactggaagaactaaagaaagaaacgaagaaaccgatttatgtgtccatgggctccatggcggcatcgggaggctactatatttcaacggccgccgataaaatctatgcttcaccggaaacgctcacgggttcactgggcgtcatcatggaaagcgtcaattattccaagctcgccgatgaactcggcatcaagtttgaaaccattaaaagcggcgcgcataaagacatcatgtccccgacccgcgacatgacgaaggaagaaagaaagatcatgcagacaatggtcaacgattcttatgaaggatttgtcaatgtcatttcaaaaggccggcacatgtcaaaagcggatgtgaaaaaaattgccgacggccgtgtttacgacggcagacaagcgaaaaaaatcggcctcgttgatgagctcggtttttacgatgatacgatcagcgcgatgaaaaaggaccataaaaatatgaaaaacgcttcagtcatcacatacgaggaaggattcggattaggctcgctcttttccatgagcgcagcgaaaatgtttaaaagcgaaattgattttctgaatatgaaagaactcatttcgcaatccggttcgccgcggatgatgtatctctatgcaaagtaggggggaagaaagaatggacgcgacttacgaaggctttcacggcaaagaagaggaagccgaacaacagagggcgcccgagcaggcatatgcgggcttttggatcaggttttgggcgtttcttcttgattggctggtggtctggggacttaaccatctcatcgtttcaccgattttcacgctgatgaagctcccggcaacaagcggaatgtttacaatctcagcttattccgtcacaaccctgatcgtctacctcgcctattttgtgttcatgacgaaatggtttcatcagacactcggcaagatggtcttcgggttaaaggtcacttctttgacgcccggaaagccgctgacttggagcaccgtcattttcagagaagcggtggggcgttatatcgataaaatctggattctctatatcgtcattgcgtttacgcccaaaaagcagggcattcacgatctgatcgccgacacaacggtgattcacgaagcgctgtaccgcaaataaaagcagtaaacccggaataaacgtccgggtttattttttttggttttggcgataatgctgctaaggaagtgaagcctatgggatatgccgcagcagctgttattctcattctcattttggtctggctgctcatgaggatgaaaatccatctgactttcgaatatcttcacgataaagataacgacaaactgacgtttaaactctcggccttatacgggctggtccgttttaaaaaaacgctgcccgtcattaaagtaaacagcgaagacgcgtctattgatgtcaaacaggacacgaaatcagaaatgaaaggtcagaaaaaagagaagaaaaaaatcacatatgaagatgtcaaacagagcattcacagaatagaaatgattctgcaccaagtcttgcagatgcgccaaatcgccgcctcatttcttgcgggagtccgtgttacgaagtttgaatgggtgacggttatcggaataaaggacgccgccgttacgggaatcgccgccggcggattgtgggccgtaaagggaggccttacggcgatgctgtatgatcatctgcgtttcatacataaaccggtgtgcgaagtcattccgtcttttcaagtgcctgcatccaagacgcatttgcagtgtatattcttttttcgttttggacatcttataggtgcagctttcaaattgctcaaatacgggcggaacggactttctatcatacgaaagaaacagccggttccggttgcttcaaagaatgattcatcagtttaaggaggagcgcatatggcagaccaccccattcaaggtttaatgaaaaccgctatggaaaatttaaaagaaatgattgacgtgaatacaatcatcggcgatcctgttgaaacgcctgacggcagcgtaatcttaacggtttcaaaggtcggattcggatttgcggcgggcggaagcgagtttggaggaaagccggctgaaaaaagaaccgatgatgatgaaagaaaagagcagaaactcccgttcggcggcggaagcggcggcggagtatccattacgccgattgcgtttctgattgtcggaacaaacggcgtgcgtatgcttcatttagacgaaaacacccatctgattgataaactgttagactccgcgcctcaaacgattgaacgcatccagcatatgtttaaaaagaatgaaaaaggccggaaccaaaaaagaacggatatcgatttataacagaaaagttaactgccgcccgcagttagctttttttacgatgcggcataacctttgcagtttgcataaaactcgactatgatagagctatacatagataaagggaggaatcagaatggctgaaattacatttaaaggcggagccgtgacgctgatcggacaagaagtgaaaccgggtgaccaagctcctgacttcacggttttgacaaacggattagaagagaagacattagcagatatgaaagggaaagtaacgatcatatccgttattccttccattgacacaggcgtatgtgacgcgcagacacgccgcttcaacgaagaagccgcaaaactcggtgatgtgaacgtttatacaatcagcgccgaccttccgtttgcacaagcgcgctggtgcggagcgaacggaattgataaagtggaaacattatcggatcataaagagatgtcatttggtgaagcattcggtgtttacatcaaagaacttcgtcttttggcgcgttccgtattcgtccttgatcaggacggaaaagtcgtttacgcggaatacgtaagcgaagcgacaaaccacccgaattatgaaaagcctatcgaagctgcaaaagcgttaatcaagtaaagagagaaaaagagctccgggtgctgccgcggagctcttttcatggcaaggaggaaacagcatgcaacacgatcatgtcggtcagatttatgaacttttagatgaagccgcccaagtgatagcagaaggccttgagatttcttatattgaggggcttgcggaggcgggagagatgtattttcttgaaacaacggaccagcttccgcttcaggaaaaacaaaccggcgagcttaaaagcctgcttgcgaaagcagacttcagaaaatgggagcatgaatggatccgcaaggcgttccagctcgccattttaaaaggactgaaagataagtcccatccgaacagacagatgacgcctgatacgatcggccttttcatcagttacctcgtgaataaatttacgggcggccgaaaaggcctgacgttgctggaccccgcctgcggcaccggaaatcttctgctgaccgcggcaaaccagctttctgacaaagcgggaaaaagcttcggcattgaaatcgacgatgtccttctgaagatcgcatatgcgcaggcgaatctgcaggaaaaagaaatggagctgttctgccaggacagtcttcagccgttatttatcgaaccggccgatgcggttatctgcgatttgccggtcggctactatcccaatgacgaaggcgctgaagcgtttgagctgaaagcggatgaaggccactcatttgcccaccacttatttattgagcagagcgtcaaacatacaaaaccgggcggatacttattttttatgattccgaaccatctgtttgacagcgcgcaaagcgataaactgaagcggttttttgcggaaaaagtatatatcaacgccctgcttcagctgccggctactatgtttaaagatgaagcgcaggcaaagagcattttaatcctgcagaaaaaaggcgaagacgcaaagccgccgaaacaagcgcttttggcgaatcttccttcttttgcgaaccagcaggcgatgcgggagatgatggcaaaattggatcagtggattcaaaaagaaaaataatggcgaaaaagcagtgtgagacgcaaaattccgcgctgcttttcgctttttaaaatgaatggaaatcagggcgaaaacacaaattaaggaaagaaaataacattccgtaaggccgtgccgtccatttggcacaaatgagatttatcagaaaatatcgacttcgtattgtaagcggtaccaatgtggatgttgacttgaaatgctgagttgacaatgtttaaatggaaaagtcagatattttttggaccgcagttatggtctgggaaaaaagaacgaacaaacgaagaagaattttgataggagcgtcatttatgtctaaaattattgcaattaacgcaggaagctcatctttaaaatttcagttattcgaaatgccttcagaaaaggtgctaacaaaaggtttagtagaacggatcggtatcgccgacagcgttttcactatctctgttaacggcgaaaaaaatacagaagtgacagatattccggatcatgcggttgcggtgaagatgctgcttcacaagctgactgaattcggtattataaaggatttaaacgaaattgacggaatcggccaccgtgtggttcacggcggagaaaaattcagcgattctgttttgcttacggatgaaacaatccgtgagattgaagagatttcagaacttgcgccgcttcataacccggctaacatcgtcggcattaaagcctttaaagaagtgcttccggatgtgcctgcggttgcagtgtttgatacggcgttccaccaaacgatgcctgagcaatcttacctgtacagccttccgtacgaatactacgagaaatacggcatccgcaaatacggtttccacggcacttctcataaatacgtgacacagcgcgcagctgagcttctcggccgcccgcttgaagatttgcgtctgatttcctgccacctcggtaacggcgcaagtatcgcggccgtagaaggcggaaaatccattgatacgtcaatgggcttcacaccgcttgcgggtgttgcgatgggaacacgttcaggaaacatcgaccctgcattgatcccgtacattatggaaaaaacggatcagacggcagatgaagtattaaatacattaaataaaaagagcggactgcttggcatatccggtttctcaagcgacctccgcgatatcgtagaagcttcaaaagaaggaaacgaaagagcggaaacggctcttgaagtgtttgcgagcagaatccataaatacatcggttcttacgctgcgagaatgagcggcgttgacgcgattattttcactgcgggtatcggtgaaaacagcgttgaagtcagagaacgcgtgcttcgcggcttagaattcatgggtgtatattgggatcctgcgctgaacaacgtgcgcggcgaggaagcgtttatcagctaccctcactctcctgtcaaagtcatcatcattccgactgacgaagaggtcatgatcgcacgtgacgttgtccgtcttgcacagtaatgatcgaaaaaagcacatcctttagggtgtgcttttttattgaatgccccagaatcaaacgttacgatatgtttaatacataaacgatgaggtgaagcaatgagtgtgcatgaacataaacaagaagccccgtcagccgtgcgctgcaaggtgataacagtcagcgacacgagaacgaaagaaaccgacaaaagcgggcgcgtcatgatggatttcatcagagaagcgggatttgaaacggtcgcttatgacattgtaaaagatgaaaaagatgaattgcagaaagccgttttatccggctgtatggatgaatatacagatgcggtgctgttaaacggagggacgggcattgccgaaagggatgtcacaattgaagcggtcacgccgctgttttcaaaagaactcccggggttcggcgagctgttccgcatgctgagctatacggaggacatcggctccgccgccattttgtccagagcggcagcgggtgtgatccgaaataccgcagtcttctgcacgcccggctcctcaggcgccgtaaagcttgcaatgagtaaactgattattcctgaactgcctcatgtgctccgggaaatccgaaaagatttataaatgtataaaaaggctctgctccgctcaaaaaattgggtggggttttttttataaaaggcttgaaaaaacagaatttacttgttacagtgtatacatacaaaatgcatttttattaattaaaactaatttttatacaaagggagcttttaacatggcagaacaaaaaaaggttgtattggcatactcaggaggtcttgatacttctgtagcgataaaatggctgcaagaacagggatacgatgttgttgcctgctgcttagatgttggggaaggaaaggatttggcattcgttcagcaaaaagcgctggaagttggcgccgtaaattcctatgtgattgatgcgaaagaagaattcgcccgggagtacgcgctcatttctatgcaggcccatacaatgtatgaaggcaagtatccactcgtatctgcactatcccgtccgttaatcgcgaaaaaactcgtggaagtggcggaaaaggaaaacgcggtggccgtagcgcacggctgcacgggaaaaggaaacgatcaggttcgtttcgaagtatccattaaatcattaaatcctgatctggaggtcattgctccggtccgtgagtggcaatggtcgcgtgaagaagaaattgaatacgccgcaagccgcggcataccgattccgatcaatcttgacagcccgtattccatcgaccagaacctatggggacgcgccaatgaatgcggtatattagaagatccgtgggcggcgccgcctgaaggggcatatgacctgacagcatctcttgaaaacacgccggacgttccggaaatcatcgaaatcgcatttgaagccggtgttccggtttcaatcgacggcgtaacctacccgctcgctgatttaattctcaagctgaacgagactgccggaaaacacggcatcggccggattgaccatgtggaaaaccgcctggtcggcattaagtcccgtgaagtttatgagtgcccgggcgccatgactttgattacggctcacaaagagcttgaggatctgactttagtgaaagaagtggcccatttcaaaccggcaattgaacaaaaactgtctgaaatcatctataacggtttatggttctcgccgttaaaagacgcgctgcttgcattcctgaaagaaacccaaaagcatgtcaccggcgttgtgcgcgtcaagctgtttaaaggccatgccattgtagaaggacgtaagtcggaatattctctctacgacgaaaaacttgcgacatatacaaaagacgatgcgtttgaccatcacgcggcaatcggtttcattgagctttgggggctgccgacaaaagtaaacagcattgtgaaaaagaaggagcagattgaagcatgaagaagctttggggaggccgttttcaaaaaacaccggaaaagtgggtcgatgagttcggcgcatccatcacattcgaccaaaacttagtcaaagaggatattacagggtctctcgctcatgcggcaatgctgaaaaaatgcggcattctgacggaagaagaagaaggtgccatccgtcaagggctgcagactctcctgcaaaaagcagaggaaggagcgcttgaattctctgttgattatgaagatattcatttgaacattgaaaaaatgctgattgaagaaatcggaccgctaggcggcaaactccataccggaagaagccggaacgaccaggtggcgactgacatgcatctatatttgaaagatcatgtctcgcatatcatcgtgctgattgaacagttccaaaaagcgctgatcgaaaaagcggaggccaatgtcgagaccattctgccggggtacactcatttgcagcgggcccagccgatttctttcgcccaccatctgcttgcttatttttggatgcttgaacgggataaagagcgttttcgggatgctatgaagcggattaacatatcgccgctcggatgcggggcgcttgccggaactacgtttccgatagaccgtaactattcggcggagctgctcggttttgactccatttacgagaacagtcttgacggagtcagtgacagagattttattctcgagtttttaagcggcagcagcatgctgatgatgcacctttcacgtttgtcagaagaaatcattctatggtgctcgcaggaattcagattcattgaactggatgatacgtacgcgacgggaagcagcatgatgccgcagaagaaaaaccccgacatggcggagctgatccgcggtaaaaccggacgcgtatacggtgatatgatgggtcttttcacaattatgaaaggactcccgctcgcttacaacaaagacctgcaggaggataaagaaggcatgtttgacacagtaaaaaccgttgaaggaagccttcagattttcacgggcatgattgaaacgatgaaagtaaacaaagacatcatgaaacaagcgacaaaacaagatttttcaaacgcgacggaacttgccgattatttagctaaaaaaggcatgccgttcagagaagcgcatgaagtggtcggcaagcttgtgtacagctgtattgaaaaaggaatctatttaagtgacatggcatttgaagaattccttcaagccagcagtctctttgaagaagatatctataccgtgctcgatccgcatcatgcggttgaaaaaagaatgagcgccggcggaacgggttttcagcaggtagaacaggcgctcgtaaaagcaaaagcctgcgccggcatttaatttgctgaaatttccttcatattttcccgtcatatcagacaccctacatctataaaagatgggaggtaaaaggaatgcgcaaagaacaagaccgttacatctatgatgaaaaagaaagtgaagaaacggccaggcttatctcagaggcataccaaagcggttatgtcggcatggaggaagcctctgctccttcagaaaattaagctgtctgtaaagacggcttttttttcgtgcggacgaagtgcaaaaaagtgatattgccgtttgtttatagtaaagtagagggagaaacgtcttgattttattgaagcggctacgttgcctggggagggtattcaatgtgcgacatgctctaatcactgccggtacaaagggattgggccgaaaagtgactgaaatgcttctggaaaaaggcttttctgtcacagtgaattacagacaggacgaagaagcggtcgcttgtctgaaggcggattatcccgggtgccatgacagattgcaattcgttaagggcgatgtaacccggaaagaagatctcatgcggatcgccgatgcagcccttcagcggtttggaaggattgacatactgattaacaatgccgggccgtacatatttgagcgcaaaaagcttgccgattactccgatgacgaatggtatggcatgcttgaagggaatttaagcgccgttttccatctgtttaaagcggttatcccggtcatgagacagcagcgcttcggccggattattacatacggttttcaaggagcggaccatgcccccggctggcttcaccgttccgctttcggagcggctaaagtcggattggcttcgttaacgaaaaccattgcgattgaagaagccgaatcaggcattacagccaatatggtctgcccgggtgatattgtaggagatatgaaagaagcgtctatagaggaagcaagacggaaaatcggcaaagaaaagacgccgatcggcaggtccggaaccggagaggatattgcgagaatcatcgcgtttttatgtgaagaagattccgatcttgtaaccggaacggtcattgaagcaacaggcgggctgaatgtgattaacaggcatcaatccctgtaagttttttcgtttgtcaaaaagggaacttgataaatattaattttttatgaggtgaaaacgatgaaagtgacttatcacggacattctgtcattcaagtggaaacgaaaacccataacattatttttgatccgtttctgaccggaaacagtctgacaaatttgaaaccggaagaagtgaaagcggatgtcatcctgcttactcacggacacaatgaccatgtcggagatacagagcagatcgccaaacaaaacgatgcgctcgtcattgcgccgaacgagctggccgtttatctcggctttaaaggtttaaaggtccacccgatgcatatcggcggggcgcaccaatttgatttcggcaaagtaaaactgacacaggcgttccacggatcggcggtcactgatgaagaaaacaaaaccatcacatacaccgggatgccggccgggattttattaacgattgacggcaaaacgattttccacgccggcgatacggcgctgttctcagatatgaaactgatcggggaactgaatcacattgacctggcgtttctgccgatcggtgataacttcaccatggggcctgaagatgcgaaactcgcggctgaatggctgagagcgaaacaggtcgttcccgttcattacaatacattccccgtcattgaacaggaccctgacgctttcgctgaaagtctgcccggaggcgtcggcaaagtcatggcggtcggcgagaccattgagcttgcctgacatatgtgtcaaagaccttctgaatcaagcattcagaaggtcttttttgtggtgccgccttttttcgggcgtctcattgcgaatgaatcccccgtacccttataataaaagcagaagactgtccttagaggtgaaacgcttggcaacaaagcatgaacaaatcctatcatacatagattcgcttcctgtcggtgaaaaaatttcggtcagaagaattgcgaaagaaatgaaagtcagtgaaggaacggcttacagagccattaaggaagccgaaaacaaaggattcgtttccactattgaacgtgtgggaccatccggattgaacagaagaaaaaagaaaatattgaaaagctgacatacgctgaggtcgtcaatgtgatcgacggccaggtgctcggcggaaaagcaggtctgcataaaacgttgaataagtttgtgatcggggcgatggagcttgacgcgatgatgcgttatacggcggcggggaacctgttaatcgtcgggaaccgaatcaacgcccaccgccaggcgcttgaagcgggcgcggccgttttggtaacaggagggtttaataccgacgacagcattatcgagctggccgatatgcttgagcttccgattctctccacgagctacgatacctttacggtagccgcgatgatcaaccgggcgatctatgatcagctcataaaaaaagagattgtgctcgtggaagatattttgacgcccgcagatcggacagtgacgctgttccctaaggataaactggagaaatggtacgaaaagaactatgaaaccggacacggccgctttccggttatcgatcagcagatgaaaatccacggaatcctcacgccgaaagatatcgcggggcatgaccggtcagttcccattgaaaaagtaatgaccaaaaaccctgtcacggtgatcggaaaaacatctgtcgcctcagcggctcaaatgatggtttgggaaggaattgaagtgcttccggtgacagacgggcatcacaaactgatcggaatgatcagccgccaggatgtcttaaaagcgcttcaaatggttcaaaagcagcctcaggtcggggaaaagctggatgatattgtttcaaggggatttaaagaagaggaagataacaaaacgccggccgtttatcaatatgaagtcacgccgcaaatgaccaatcagctcggcacgatttcttacggggtgtttacaacgattttaacccaggccgccagccgatttttacgctcccgcaaacgcggcgagctggtcattgaaagcattacgattttcttcctgaagcccgtacagatggagtcggtcatagaagtgaaaccgcgcattttagaggcgggccggaaattcgggaaaatggaagtggaagtgtcaagccaaagcggcatcgtttcaaaagcgatgctcatggtgcagctgatggagagaagttaagggacacacccgggtcccttggcattcattatgcgtggtccctctccgcttcctttgcatggatgggctcataatgcttataggctttatacccggcccatgcgctgcctgctccgattaaaatgaagacgccgccgatgaccagggtcaggacggagtggaacagaatcatttggtttactccgtacaaaagcaccagcgcgcctaatgccatacttgatttagccgaaaaacattccttctccagcgcccgtttcgtctggattccttttactttgtaatacacgtaaaagcaggcagaaagcccgatgagaaaaacaaaaaccagcataaatgaaatcctccattatatgagtttgcaaaaccgtttataccgttgctgaaagattttccttttccatggataaagagtatgattaaatgaataaaaacgaaaaggagaaaacgatgaaatccgaactgatcagaaccatatcattatatgacaccattatcttacatagacatgtgaggcctgacccggatgcctacggttcacagtgcggccttacagaaatcctgcgggaaacgtatcccgaaaaaaatatttttgccgtcggacagcctgaaccgtccttgtcttttttatattccctcgatgaggtggatgacgaaacctataaagatgctcttgtcatcgtgtgcgacaccgcaaaccaaggcagggtcgacgatcagcgctaccattccggcgcaaagctcatgaaaatagaccaccatccaaatgaagatccgtatggcgatctgttatgggtcgatacgaatgcaagctccgtaagcgaaatgatctatgagctgtacctggaaggaaagcagcacggctggaaactgaatacgaaagcagctgagctgatctacgctggtatcgtcggtgatacggggcgcttcttattcccgaacaccacaaaaaagacattaaaatacgcgggagagctcattgagttcccattttcatcgtcagagctgttcaatcaattgtatgaaacaaaattaaatgtggtgaagcttaacggctttatttatcaaaatgtgtcactgtctgaaaacggcgtcgcttccgttttcattaaaaaagacattttggagacatatggaaccaccgcttctgaagcgtcgcagcttgtcggaacactcggaaatatttcgggtatccgcgcttgggtgtttttcgtagaagaagacgatcaaatcagagtccggttccgttcaaaaggtccggtcatcaacggaattgcccggaaatacaatggcggcggacatccgcttgcggccggcgcatccatcttcagctgggatgaaaccgatcagattcttgctgatctggaagaggtatgtaacgaacacaagtagaggggagaccctctttcttagtgttcatctgtcacggggatgaaccagcagccgaattcagtcaggtcttcgtagacgcggagattacagatttggagttctttttttatgagggaagcgagtgtgtctgtttctgcatatgcggaatagccttgtctgattcgggctgcatgatcttttgccaagcggcgttcactaaaaacctccattttcccttcctcccttcagaatcgttgaaaatgtctcatctacagtttataaaaaagcggagaaaaaagcgacagatctatggaaaatttttaaaaataacataattacgtcgcaaaagaaatatgaatttcgacagacaatctcgtataaatcgtcagttcctttacttcagctttaaattccttctcatttatggtgtatattttgttttcaattgtccgttttaaaagctcctttgttttatacacgctttcaatatcctttgtgatgacttcagaaatattatctttcacctgttcctcaaatttcatcttgtcaggctgggcgattctgtatttttcccaattaatcagcttcacatcaacactttggatgagaagtctttgcttattatcctcatttaatttatgaagatctttctgatagatggagatttggttttttaaatcccgcgcgtgctcccgctgcttttcaattaacgtcacctgttcttcctgaaacgttccgtatgtaaacagaaagaacagccagctgatgatggctccgcacatcattcccgcaaaaaaacgctgccatcccggttttttataatactcgggaattctcatgatgacatattctcctgggtcagccatgaaataatcagccagccggtctgcgcgccgcccattgctgaaataattaaaagaagctgtttgaagatgtcgcgcgtgttgccttcaaacagcccccgctcgaaactgtataccgcgtcaaatgttcccccgatggccgcgacaagcgcccagatcttcagcctgttcgccaattttgtgatcgccgtcagcggaggctcgcctgataaataagctccgaggccgccgatcagcgcgccgccgagcaacacaccgagggcgataaaataactgctgatgaaattcgccataaagccggcttcctgatccatatatacaccacctcacttttctatcatattgagcgaaacggacaagtatgatgatgagtcaaaaaagaacatttgtttcttaagaaaacccgtcttataatgtagaaagacaaaatgaacgtatgggaaaggagtggcggcattgtcttttgttcacctgcaagtacatagcggctacagcctgttaaacagcgccgcttctgtaaaagagcttgttacacaagcgaaggaactcggatattcatcattggcgctgacggacgaaaatgtgatgtacggcgccattgagttttataaagcatgcaaatcaaacggaattaagccgattatcggtctgacggcttctatatacacggacgatacggagcttgaagcacacccgctcattcttttagcggagacaaacaccggttatcagaacctggtgaaaatctcaagtgcgctgcaatccatggcaaagggcggcatgaagcgaaaatggatgaagagctatcatgaggggctgatcgccattacgcccggtgaaaacgggtacattgaaagcctgcttcaagccgggaagtttgaagaagcggtccgggctgccgaaggattccgggagctgttcggagacggccgtttttatttagggtaccagccgtttaaaggacatgagacgttatcagaagagattctccgcctgtcagccgagacggaaatcgctgtctgcgctgcgggagatgtccgctatatcaagaaagaagatcaagatgcgtaccgctgtctgtgcgctattaaagccggagagaaatgggaggatcagagcgggaatctgccggacttatacttgaggacgcctgaagaaatggcagagctttacacgcggcatccggaagcgattgaagcggccgcccgtatcgcccggcaatgccgggtcgatgtaagcctcggacagacacagcttccgtcttttccggcgccggacggcaaatcagccgatgactatttggcggagatctgtcatgaggggctgcgtctccgtttcggcactcctgatgagcgggctgtccgccggcttgaatatgagctggacgtcatcaggcgcatgaaattcagtgattattttctcatcgtatgggactttatgaagtacgcgcatgaaaagggcattgtgacaggcccgggaagggggtccgcggcaggctcgcttgtcgcttactcgcttttcattaccgacgtggatccgcttaaacattctctgctgtttgagagatttcttaatcccgagcggatcagcatgccggatattgatatcgatttccctgatacgagaagggatgaggtcattcagtatgtacaaaataagtacggggccatgcacgtcgcccagattatcaccttcgggacattggccgcaaaggcggcgttaagggataccgggagagtgttcggaatcagcccgaaagaagccgaccagcttgcccgcctgatcccgtcgaaaccgggaatgacgcttgaggaggcgaggcggcagtccgctcagctgaacaggcggctgtccgaatccgccgttcttcataaagtgtttcagatcgcaaggaaaatcgaaggtcttccgagacacacgtcaacacacgcggccggggtcgttctcagtaaagagccgctttcggaagttgtccctcttcaagaagggcatgacggcgtgtatttaacgcagtatgcgatggatcacctggaagatctcggtcttttgaaaatggactttttaggtttgcgcaacctgacgcttattgaatccattaaaacgatgattgaaaaagagacgaatacgaaaattgatttttccgagatttcttatcaggatgaaaaaacgttctcgctattgtcaaacggtgatacgacgggtattttccagctggaatcatcaggaatgagaaacgtgctgaagcgcctgaagccgtcaagactggaagacattgtcgcggttaacgcgctttacaggccgggaccgatggaaaatattccgttatttatcgatcggaagcacggacgggcgcgtgtggaagtgccgcacgaggacgtaagaaatattctcagtgacacttacggcgtcatcgtctatcaagaacagataatgatgatcgcctcgcgcatggcagggttttcattaggtgaagcggatctgctcagacgggctgtcagcaaaaagcaaaaggacattctggacagagagcgaagccattttgttgaagggtgcttaaaaaaggagtattctgtagtcactgcaaacgaggtctacgatctgattgtaaaattcgctaactacggattcaacagaagccatgctgtcgcatacagcatgatcggctatcagctcgcctatttaaaggcgcattatccgctatattttatgtgcgggctgttgacgagcgtcatcggcaatgaggacaaaatatcgcaatatctgcatgaagcgaaggggagcgggattcaagtccttccgccgtcaataaacaaaagcggttttccgtttgcgccggaaaacggagccgtcagatacagtttgcgggccgttaaaaacgtaggcgtctcggcagtgaaagatatttataaagcaagaacacataaaccgttcgaggatcttttcgatttctgctttcgcgtacctgcaaaaagcgtgaatcggaaaaccatcgaagcccttatattttctggcgccatggacgaattcaatcaaaatcgcgccgccttgctggcctccgttgatgtggctttagagcacgctgaactttttcgtgcagacgatgaccaaatgggattgtttttggaagaatcgttttccattaagccaaaatatgtagaggctgaggaatttccgctcgtggacaagcttcggttcgaaaaagaagctctcggtgtttatttctcaagccatcctttgtctgctttcagggatctcctgaaaaaacggggggcgcaaacgatcacagcagcgcggcagatgccgaagggacagctgtcaatcggcgctttgctcgcgggcattaaaacgattcggacaaagacaggtcagcatatggcgtttctcacattaagcgatgaaacgggagaaatggaagccgtcgtgtttcctgaccaatatagaaggctgtctccgctgttaaaagaaggcgcgcttttattcgccgccggaaaaatggaagagcgtcaggagaagacacaattcatcatgtcatccgcctctcttcttgaacagacggaggcagacagagcgccgtctgtttacatcaaaatcgaaggcagccggcacaatcaggagtttttggaaaagatgaagcgtattttactggagcataaaggggaaaccggcgtttatctatattatgaaaaagacaagcagacgatcaggctgccggatacttttcatattgaggcggaccatcaggcgttataccgtttaaaagagctgctgggccgcgaaaacgtcgtgttaaaatagtggtaacaataatcgttttgttatacaattgaaacaattgtgctatcttatttaaagattctgaaatttttcacctccagcgattgtaccagtctatgcggcagaatatgtaacaaagtacttaaaaggagtgtttagaatgtcattaagagaagaagcgttacatttacacaaagtaaatcaaggaaagctggaatcaaaagcaaaggtagaagtcagaaacgcggacgacttaagccttgcctactctcccggagtagctgagccttgtaaagagatttatgacgataaaaataaagtatatgattatacaatgaaggggaacatggtagcagtcgtaacagacggatcagccgttctcggtctcggtaatatcgggcctgaagcttcacttccggtcatggaagggaaagcggtgctgtttaaaagtttcgcgggcgtggatgcattcccgatcgcgcttgacacaaacgatgtggacaaaatcattgacactgtgaagctgcttgaaccgacattcggaggtgtcaaccttgaagatattgcggcgccgaactgcttcattatcgaagagcgcctgaaaaaagaaacaaacattccggttttccacgatgatcagcacggcactgccatcgtaaccgttgccggacttgtaaacgcgctgaaattatcaggaaaatccatgtcatccattaaagttgtggcaaacggagcgggagcggcaggcatcgcgatcattaagcttctttaccatttcggcgtacgcgacatcgtgatgtgcgactctaaaggagcgatttacgaagggcgtccggccggcatgaacgcggtgaaaaacgaagtggccaagtttacaaaccaagaccgcaacgatggctcgctgcaggatgtcattaaagatgcagacgtctttatcggcgtatcagtcgaaggcgcgctgacgaaagaaatggtggagagcatggcgaaagatccgattatcttcgcaatggccaacccgaatccggaaatcatgcctgaagacgcgcgcgcagccggcgctagcgtaatcggaacaggccgttctgatttcccgaaccaggttaacaacgtgctggcattccctggaattttccgcggggcgcttgacgttcgcgcgactcacatcaacgaagaaatgaaaattgctgcggttgaagcgattgcttcccttgtttcagaggaagaattaagcgctgattatgtcatcccggctccgtttgacaaacgcgtggctcctgccgttgcgaaagctgttgcgaaagcagcgatggaaacgggcgtcgccagaattacggtcgatcctgaagaagtggctgaaaaaacaagacagctcacagtcatcggggaataataacacaaaaatgaaatggcagcgcgttggaaaaaacaacgcgctgctgttcaatatacggactgctggcatttttttaagggcaggtcttaaaaaaatttcagcagaatccttatttcttttgaaaacgctgacagataaggctgaacaacgctttttacggtatgaaatccgtccgtttccgtctgttttgcagcaaaaaatgtcgaatggaggatgacaccgtttgacaaaaaaagtacaatagtttcggtaaagttattattaagtctatctaatcggaagacatgcagtgaagagaacccttcacaaaagggaggtaatcatttgttaaaggatatattcacaaaaaagaaaaaatatgcttccgtgccgtctgagcaggcaaaacatgatgttccggaaggcattatgacaaagtgccccaaatgtaaaaaaatcatgctcacaaaagagttagataaaaacctgcgcgtctgcatgaactgcgggcaccatttcccgatgaatgcaaagcagcgcattgaaagcctcctggatgaagattcattcgaagaattcaaccagggaatgatatctgaaaacccgctcggtttcccggaatacttagaaaaaatcgaaaaagaccgtgagaaaacatcgctgaatgaagcggtggttaccggaaaaggaaccatcagcggattccctgccgtgatcgcgatcatggattcaacattccgaatgggcagcatgggttcggttgtcggcgaaaaaatcacgcttgcaattgaaaaagcaaaagaggaaaaagtcccgtttatcatctttaccgcttccggcggcgcacgtatgcaggaaggggtcttaagtcttatgcaaatggcaaagacaagctctgcattaaaactgttcagtgaggagcagggactgattatttctgtcatgacccacccgacgacaggcggcgtatcggccagtttcgcgtctctcggtgattataatttcgctgaaccgggcgccttgatcggatttgcaggaagacgtattattgaacagacgatcggggaaaaactgccggaagatttccagacggcggaatttttattaaagcacggccagcttgatgcggtgattcaccgaaacgacatgaaagagaaactcgcatttctgctggacatgcaccaaacaggaggtgagcatgagtggctgcaagattagaatttgaaaaaccggtgattgaactgcagacgaaaattgccgaactgaaaaaattcacccaagattcggagatggatttaagcgctgaaatcgcaaggcttgaagaccggctcagcaagctccaggatgagatttataaaaatctgaagccgtgggacagagtgcagatcgcacgccttcccgaccggccgacgacgcttgattacattcaatacctgtttaccgacttttttgagtgtcacggagacagaacatacggagatgatgctgcgattgtcggcggagtcgccaaatatcacggcatgccggtcaccgtcatcggacatcagcgcggaaaagacacgaaagaaaaccttgtccgcaatttcgggatgcctcaccctgagggctaccgcaaagcgcttcgtctcatgaagcaggcggataagttcaaccgcccgattatctgcttcatcgacacgaaaggagcgtacccgggtaaagcggcggaggaacggggacaaagtgaagccatcgccaagaacctgttcgagatggccggcctgacagtgcctgtcgtttgtatcgtcatcggggaaggcggcagcggaggcgcgcttgcgttaggtgtgggcaaccgcatgctgatgcttgagaactcgacgtattccgttatttctcctgaaggagccgcgtccattttgtggaaagactccagccttgcgaaaaaagcggccgaaaccatgaagattactgcgcccgatttattagaattaggaattattgatgatatgattaaagaagtgaagggcggagctcaccatgatatcaagcagcaggcgggctacattgacggtattcttaaagaaacgttaaaatctcttcttcgattgaacgccgaagagttgatctcacagcgctatgaaaaatataaagcaatcgggaaagtttcggttgaggatcaatatatcggggtaaactgaatagacgtgaagcctatggctcacgtttattttttgtgatttttgtgatattccttaaattttatttaaaaacaatttatttaattgtataataggtaaggtttcatgggagctcaggcgtcccttttcattgttttagggcaatgatcatgatatgtttaacatatatagttgctgaggtgaataggaaatgaagcgtataggagttttaacgagcggcggggattccccgggtatgaacgctgcggtgcgcgcggttgtgcggaaagctatctaccacgacgtcgaagtgtacggaatttataacggttattcaggattaatcagcggaaaaatagaaaaactggagctgggttcggtcggtgacatcatccaccgcggcggaacaaagctgtatacggccagatgtcctgaattcaaaacagttgaaggccgtgaaaaaggaatcgaaaatttaaagaaactcggcattgaaggtcttgtcgtcatcggcggagacggttcatacatgggtgcgaaaaaattaacggaacacgggtttccgtgtgtaggtgtaccgggtacgatagataatgacatcccgggaactgattttacgatcggatttgatacggcgttaaacaccgtaattgatgcgattgataaaatccgtgacaccgctacgtctcatgagcgtacatacgttattgaagtgatggggcgccatgcgggcgacattgctttatgggcaggtcttgcaggcggagcggaatcaatcttaattcctgaagcggactacgatatggaggaaattatcggccgtttgaagagagggcacgaccgcggcaaaaaacacagtatcatcatcgttgcagaaggggtaggcagcggggttgaattcggaaaacgcatcgaagaagaaacgaaccttgaaacacgggtatccgttttagggcacatccagcgcggcggatctccaagcgcttctgaccgggttcttgcaagccgcctcggcgcttacgcggttgagcttctgcttaaaggaaaaggcggacgctgcgtaggtatacaaaacaacaagcttgtagaccatgatattatagaaattttagaatcaaaacatactgttgaaccaaacatgtatcagctttcaaaagaactgtctatttaaggcggaagaagctgaagatttcagaaggaagtgaacgagttgaaaaaaacaaaaatcgtttgtacaatcggtccggccagtgaaagtgtagaaatgctgacaaaattgatggaagcgggtatgaacgttgctcgtctgaatttttcacacggtgatttcgaagagcacggcgcaagaatcaaaaacatcagagaagccagcaaaaagctcggcaaaaacgtggggattctcctcgatacgaaaggtccggaaatccgcacgcacgatatggaaaacggcgcgcttgagcttcaggcgggaaatgaaattatcgtttctacgaaacaggtgctgggaacgcttgaaaaattctcagtttcttatgaaggcctggcagacgacgtgtcagcagggtctatcatcctgctggatgacggtttaatcggattggaagtgctggaatcaaatccggaaaaacacgaaatcaaaacaaaaatcttaaacagcggcacgctgaaaaataaaaaaggcgtaaacgttcccggcgtcagcgtcaaccttcccggaattactgaaaaagacgccaaagacatcatattcggtatcgagcaaggcgttgatttcatcgctgcgtcatttgtacgccgttctacggatgtcctggaaatccgcgaactgcttgaagagcataacgcgtctgacattcaaatcattcctaagatcgagaaccaggaaggcgtggacaacctggatgcgatcctggaagtatctgacggcctaatggtagcgcgcggagacctcggcgtagagattccggccgaagaagtgccgctcgtgcaaaaagaaatgatcaaaaaatgcaacgcgctgggcaaaccggttattactgcgacacaaatgctagacagcatgcagcgcaaccctcgtccgacacgtgctgaagcaagtgacgttgccaacgccattttcgacggcacagatgcgatcatgctttccggtgagacggctgcgggacaatatcctgttgaggcggttcaaacaatgtttaacatcgccacacgcacggaagaatctctgaactataaagaaattctgtctaaacgcagagatcaggtcggcatgacgattactgatgcgatcggccaatcagttgcgcacacggcgatcaatctgagtgcggcagctatcgtgacgcctacagaaagcggccatacggcgcgtatgatcgcgaaataccgtccgcaggctccgattgtagccgttacggttaatgagtctgtatcacgcaaactcggccttgtattcggtgtattcccgtcaagcggccaaaacgcgaattctacagatgaaatgcttgaagacgcggttcaaaaatcacttgacagcggcatcgtgaaacgcggtgatctgattgtcattacagcaggttctgtcggtgaatcaggcacgacgaatctgatgaaagtccacactgtcggcagcattatcgcgaaagggcaaggcatcggacgcaaatctgcattcggtccggtcgttgttgcaaaaaatgcgaaagaagctgaacaaaaaatgacagacggcgcagtattggttgcttcaagcactgaccgcgacatgatcgcttcacttgaaaaagcatcagcgctcatcactgaagaaggcggtctgacaagccatgcagccgttgtcggtttaagcttgggcattccggttatcgtcggccttgagaacgcaacttcagttttaacagaaggacaggttatcacagttgacgctgcccgcggcgctgtgtatgaaggccgcgcaagcgttctttaaacagctttaaaaaagagaggggggttctcccttctcttttgtctttaggttgattttcctattcccatgcgggcggtgacgcgcttttagaagggcaggagggcagaaaaatgagagtgttattcttactgtttatcgtatgtccggcaattgaaatcggtttgtttctgctggcgggaaaatggctcggtatttttccgaccttccttctcatcattttgacaggcgtgttaggcgctttggtggcaaaaagacagggaaccgatgtgtatcatcgggtgatgcgcgacctgcagcacggcaaaatgccgggggaagcgcttcttgacggaatatgcgtctttttcggaggcctgcttttgatgcttccgggttttctgtccgatattgcaggggcctgtcttctgattccgttcactcggaaccgcatgaagccgtttttgttcaaatggctgagagggatgtcaaaaaacaagcggatcattatcaaataaaaaacggcagccttcttacagggctgctgtttttatttggattgaacagtaatataggcccatatttcttttagagcgcccgttgtgataaaggcctgaatgaaaacgagcagcgcgggcccggcagccagtcctaaaattccgaacaatttaaagccggcaaacagggcgattaaggtcgcaagcggatcaagtccgattgacttgcttaaaattttcggctccgtcagctggcgctgaatgagaaccacaatatataaaacaccgagaccgatcgcttgaggaagctgaccggcaatggccaaatacataatccagggaacaaagaccgacccggcgccgagatacgggagcagatcaaccaggccgataaaaaaggcgatggttgccgcatgctcaatccctaaaagaaaaagtccgataaagacaatgatcatcgtgaaaagtatgagcacggcctgcgccttaatgaaacctgccatcgcttttttcagctctcccgatacggccttggcgtttgccgaaacccgttccggaaaaatggaataaagcagcgccttcagcttatgccagtcctttgtcataaaaaaagtcgccagcattgcgaaaatgaagacggcagctgtattgggaaggaaggcaatccatttcggcaccagctccaaaagatgtgaaagcatgagccccgcatttttagcggctgtatcaccgagggtctgaatatgcgtcacgatggaagcctgctgattggtttccagcccgttaaataggacggtcagctcgtggtacaatggctgaatgcgggaagtgaacagctcttcgcaatacgtcataaaggcgctgatatggggagggagcgttttggccagataggcggttcccgaaatgatttccgcaacgagaaatgttgccgcgccgagaagaataagcaaaaagaagaccaggacaatgactgtattgactgaccggggcagccccgtcagtttgtccagccagtcaacaacgggaatgatcgctgatgacagaataagggcgatcagaaacggataagttaacggaaatgaggcgtaaccggccgctaaagcgccgccggccgcagcgagtacaaacagcgcgcggaaaaaaacagttgcatagtgcggattcacatcgatcctcctctcggtcggcacgtcctattacattagtttattcgtcaaaaaaaaggatatgattacagatatgatgaaagagggtgctttcaggatgtttacacaggcgaatttatttttactattattgctggccatcgcattggtagccaaaaatcagtcattgctttttgccgtcggctttctcattgtgataaaagctgtcggtcttgatcagaaactatttccggttattcagtcaaaaggcatcaactggggggtcaccgtcattacaatcgccgttttagtgccgattgccacaggtgatatcggttttaaacagctcggagaagcgatgaaatcatattatgcgtggatcgctctcggtgccgggatcgcggttgccttaatcgccaaaaacggtctcaccttattggaaaacgaccctcatattacaacggcgctggtcatcggcacgatacttgccgtcgcgcttttcggaggcgtcgccgtcggcccgttaatcggcgccggaatcgcctacttggccatgcaaatcgttaaaatattcacttcataaagtaaaaaagcggcgtaaagctgcttttttttgcgggtgaaaataagagtttgcagggcattttgtagttcagacaaatgccatttgcattattccgaggaatgaagtggcttaccatgtaacaaagaacttcggaatcgccggcgcatattgtgcgatgacagcggatgcagtaaggcggttccaattgatgaatggattaaaagctgatggaatttatgcacttgaaccaaatcaaaacttgaagtgttgttaaaataagcggagaccctttccttcaatttgaaagtttgttaaatttataatgagaatgaaaaaacacaattcggttggtagtccggatgcattatttaaaatgtcagtaaccttcccctcctcgggatgtccatcattcttcagtaaatttaggaggagggaatcgttatgaaattaacggtttactacgatggtcagttttgggtaggagtcattgaagttgtgaatgatgggaaattaagagcagttcgtcatttgtttggaaaagagcccaaggattcagaaatcatgcattttgttcataatcaacttttacagactctctcccgcactgaacaaacaggggtttgtgttaaagcaaaatctaagaagttaaacccaaaaagattacaacggcaagcttctaaagagatgaaaaatatcgggatatcaactaaggcgcaaaaagcgataaaacaggagcttgaagcaagaaaagaaaagaaaaaacaactgaacagaaaacaaagagaaaaaataaaggaacaaaaatatttaatcagaaaacaaaaagcaaaagaaaagcataggggcaaatagttggagaacccgaagcccttcgattaaaaagttgagcggcatcagttttttcttcggactgatttagaaaaaagaagcagaaatcgagcccttctcgagatgaggagggtttttctgcatttatttaacttcacctacatcagtaaatgagtcagtttcaattgatgaacggtttgatgaggatatttacgggccgacaacagcgcaaatgcagtcaaacgattccagtccatgtacggggagccaactaaaaccaagacatggatttccgaagctgatccgaacattgattcagtcgagtaaacaaaatccccccttctccggtaaagaaggagggatttgcggtgaagttgttgcgcctgtccttttaaagtttccccaaagctccccccaaatgaaaacatgagaatacatggttttacaaagcatctgaaagcaagcgattaaatttatcaacgccaagccttgatatatagggcttttaaaacatttttagttaaaagtctacaaattaatcagattattgtttataataagaataggcttaaacttaaataagcttataagaatttgttatgttcctctataagcataccggttatgtaaccgcaaccagtgaaatgtaagcattttcttaaaggggaaagggattgtttgcatgactcattttaagtaagccgtatgttttatatactctttaaaggggaattttgattgaaaaggagaggttgaatatgacagcaacacgcggtcttgaaggggttgtagcaacaacatcatctgtaagctctattatcgacgatacccttacatatgtagggtacgatattgacgacttgacagagaatgcaagttttgaagaaatcatttatttgctgtggcatctgcgcctgccgaataaaacggaacttgctgaactgaaaaaacagcttgcgaaagaagctgccgttccacaagaaatcattgagcacttcaaatcctatcccctcaataacgtacatccaatggctgcgctccggacggcgatttcattactcggtctgactgacagtgaagccgatgtcatgaatccggaagcgaactacagaaaagccatccgtctgcaggcgaaagtgccgggcattgtcgccgctttctcaagaatccgcaaaggacttgatcctgttgaaccgaaggaagagtacggaatcgcggagaacttcctttacaccttaaacggtgaagagccttctccgatcgaagtggaagcgtttaacaaagcgctcattcttcatgcggatcatgagctgaatgcatcaacatttacggcgagagtatgtgtcgccaccttatctgatatttactcaggcatcactgccgcaatcggcgctttaaaaggaccgcttcacggcggagccaatgaagccgtcatgaaaatgctgacagaaatcggcgaagtggaaaacgccgagccttatatccgcagcaaaatggagaaaaaggaaaaagtaatgggcttcggacaccgtgtgtataagcatggagacccgcgcgccaaacacttaaaagaaatgagcaaacgcctgacgaatctgacgggtgaaagcaaatggtacgagatgtcaatccgtgtcgaagaaatcgtgacgtcggagaaaaaacttccgcctaacgttgatttctattccgcatctgtctaccacagtctcggcattgatcacgatctgttcacgccgatctttgcggtcagcagaatgtcaggatggatcgcccatattcttgaacaatacgataacaaccgcctcatccgcccgcgcgctgattacacgggtccggataagcagacttttgttccgcttgatgaaagagcctgatcaaacgggaggctggtgattttcatgtcgttagcctcttgttaatcaagcccggattggtttacaattttgatagaatcttgagaaaagtcattttattttttatacaagaaaaataaaatgttttctaaatatgaattacatactgggaggtaatattgtgtcacaaggtgaaaaaattacagtctctaatggagtattaaacgtaccaaataatccgattatcccgtttattgaaggcgacggcacaggccctgatatttggaatgccgcttctaaagtattggaagccgctgttgaaaaagcatataaaggcgagaaaaaaatcacgtggaaagaagtttatgccggtgaaaaggcttataataaaacaggtgagtggcttcctgccgaaacactggaagacatcagagagtacttcatcgccatcaaaggtcctctgacgacgccggtcggcggcggtatccgttctctgaacgtggcgctgagacaggagcttgatttgtttacgtgcctgcgccctgtcagatatttcacgggagtgccttctccggtcaaacgtcctgaagatacggatatggtcattttccgcgagaatacggaagatatttacgccggaattgagtatgcgaaaggttctgaagaagttgaaaagctgatcagcttcctgcaaaatgaaatgggcgttaacaaaatccgtttccctgaaacgtcaggaatcgggatcaagcctgtttctgaagaaggcacaagccgcttagtcagagctgccattgagtatgcgatcgaaaacggccgtaagtctgtcacgcttgtccacaaaggaaacattatgaagttcactgaaggggcatttaaaaactggggctacgagcttgccgaaagagaatacggagataaagtattcacttgggctgaatatgaccgcattgtcgaaaaagacggaaaagaagcggctgataaagcgcagagcgaagcggaagcggcaggaaaaatcatcgtcaaagacagcatcgctgatattttccttcagcagatcttgacccgtccgagcgaattcgacgtcgtggcgacaatgaacttaaacggagactatatctctgatgcgcttgccgctcaggtaggcggaatcggaatcgcgccgggagcgaacatcaactatgaaacagggcatgcgattttcgaagcgactcacggaacggctcctaaatatgccggccttgacaaggtcaacccgtcatccgtcatcctttcaggagtgcttcttcttgaacacctgaactggaatgaggctgctgacttgatcattaaatctatggaaaaaacgattgcttcaaaagtagtaacgtacgattttgctagattaatggacggtgcaactgaagtgaaatgttcagagttcggtgaagagctcatcaaaaacatggactgaacctaaagcagacttctaatgaagccaaaaaaggagaagagaatcatgggaaaaacacgcagtaaagtttctgttatcggagcaggatttacgggagcgacaacagcctttcttacagctcaaaaagagcttgcggacgttgtgctcgttgatattccgcaattagaaaacccgacaaaaggaaaagcgctagacatgctcgaagcaagtccggttcaaggatttgacgcgaaaatcacaggcacgtccaactacgaggacacagccggttctgatatcgtcgtcatcacagccggaattgcgagaaaaccaggcatgagccgtgatgatctcgtatctacaaacgaaaaaatcatgagaagcgtcacacgtgagatcgtgaaatattctcctgactgcattatcgttgtattgacaaaccctgttgatgcgatgacatatgcggtgtacaaagaatcaggcttcccgaaagaacgcgtcatcggacaatccggagtgcttgacactgcgcgattcagaacattcgtcgctgaagaattaaacctgtctgtaaaagatgtgaccggttttgttcttggcggacacggtgacgacatggttcctctcgtccgttattcctatgcgggcggcattccgcttgaaacgcttatcccgaaagaccgtcttgatgcgattgtagaacgcacaagaaaaggcggcggggaaatcgtcaaccttctcggaaacggaagcgcctactacgcgcctgctgcatcactgactgaaatggtagaagccattttgaaagatcagcgccgcgtgcttccgaccatcgcttacttagaaggcgaatacggtcatgaaggcatttacttaggcgtaccgacgattatcggaggaaacggcctggagcaaatcatcgagcttgaactgacagactatgaaaaagcgcagctgagtaaatcagttgaatctgtcaaaaacgtgatgaaagtattgtcataagaaaaaagggaaggcttccgaatcagaagccttcctctttttacaattaatgaaagcgttttctttttccctgagcgatcctttctctgaaaatgatcaaaaaggcgaattgtctgaacgggcagtattggataaaatgaaatcataaagtgatatgcagcacataaaatagagaaaattggatgtcggggaaaatagacagcggagggcgcagcatgaacaaaaaaattttagttgtagatgatgaacaatctatcgttactcttttacagtataatctggaacggtccggctatgatgtcataaccgcatcagacggcgaagaggctctggagctggcagagaatgaaaatccggatttaatcgtactggatgtcatgctgccgaaagtggacggaatcgacgtctgtaaacagctcagacagcagaaaatgatggttccgatcttgatgctgacagcaaaagatgaggaatttgataaggtgctgggactggagctcggagcggatgattacatgacaaagccgttcagtccgcgggaagtcactgcgcgggtgaaagccattttaagaagggctgacatttcttcgctgtcacaaggcagagaagaggaaaaggacgggcagatcctcatcggcgagctgaaaattcttccggagcattacgaagcgtacttcaagtcagaacagctggaattgacgcctaaagaatttgaactgcttctgtatttgggaaaacacaagggaagagtgctgacgagagatcttctgctgagcgcggtctggaactatgattttgccggggatacccggattgttgacgttcatatcagccatctgcgcgacaaaatcgaatcaaataccaaaaaacccatctatattaaaacaatcagaggtttggggtataaactggaggagccaaaaatgaatgaataaagtccgtgtgcgtctgttcgctttactcgttgtatgtatcatattggttttcagtgttctcggcctttttttacagcagcttatttcttcatccgctgaagaaagaacggcggatcagctgaaaaaggaatcggtatacatagcgggccttcttgacaccggccgaatcggcaataaaagcaatgaaacggtaatccgtgacgccggccgcaccctcggtataaacgtctccttgctcaacgagaagggtgacgccgtatatcattccggcagtcgtgctgatgattcagccgtaaaggagttcatttctcacaataaaagcgaggaagccgtacagtcgaaaagcagagtcatccgcggcactgccgtaaaaaatgacgcagggaaaattgcggggtatgtactcgtttcctcggatatcaacggcggttcaagcgttaccggagaaatgtggggcatgctggcagcaagtctttgtaccgcttttatcattatcgttttcttttatacaaacatgacgtcgcgttacaaaaaatcaatcgacgccgcgacaaaggtggcgacggagctgtccaaagggaattacgacgcccgctcctacagcggttacgcaaggcggtcggaccgtctcgggcgtgcgatgaacagcctggcggtcgatttaatggaaatgacaagaacgcaggatatgcagcgcgatcgtctgttaaccgtcattgaaaatatcggatccggtttgattttaatagacgggagaggttttatcaatctcgtgaaccggtcatacacgaagcagtttcatacaaagcctgaacgtctgcttcggcgcctttaccacgatgcgtttgaacatgaggagatcattcggcttgtcgaagacatttttatgacggagacgaaaaaatgccagctgctcagacttcccatcaacattgagcggcgctactttgaagttgacggcgttccgatcatgggccctgatgatgaatggaagggcatcgtcctcgtttttcacgatatgacggaaattaaaaaattggagcagatgagaaaggacttcgtcgccaatgtctcccatgaactgaaaacaccgatcacctcgattaaaggatttacggaaacactgttagacggagcgatgaaagacgaaaaggcgctttcagactttctgtctatcattctgaaagaaagtgagcggctccaatctctcgtgcaggatttattggatttatccaagatggagcagcaaaactttacgatgcgcgtagagtcctttgatgctgcaaaaattctgcatgaaattgaggcgcttttgcagcataaggctgaggaaaaaggcatcagctttcagctcgatctcccggaagagccgatttttgtgacgggtgatgcgcacaggctgaagcaggtatttttgaatctggcgaacaatgccctgacctacacgcctgaaaaagggacggtggggatttcggtacatgtgaaagaaaccgttgtcgatatcaaagtgtccgatacgggaatcggcattcagaaagaagagatcccgcggatatttgagagattctaccgcgtggataaagacagaagccgcaactcgggaggaaccggcctcggcctcgccattgtgaagcacttaatagaagcccatgaaggtaaaatcgaggtcacaagcgagcctggacagggaactgtgttcactgtgacgctgaagcggccgccggcagcgtgatcagctttacaaaggattaacaatttcttcatgacctgttaaacctatcttgttaggatataacagaaccccttcatccaaggagccaattttgacggcgggaacgcgttttcttgttcccgtccttttttgcgttttcacggggtccgctcattttcctttcaaattgaactttgttaaaataagagaagctgtgagattaaaaaacagaggaatgacgagcttttgctcttaggaggatattgaatgacggaacgaaaaaaattagtgcttgtcgacggaaacagtctggcgtaccgggcgttttttgcattgccgcttttaagcaatgaaaaaggcattcatacaaatgccgtatacgggtttgcgatgattttaatgaaaatgctggaagatgaaaaaccgacccatatgctggtggcttttgatgcgggaaaaaccactttccgccacagcacgtttaaagaatataaaggcggaagacaaaaaacgccgccggagctttcagaacagatgccgttcatccgcgagctcctcgatgcctacaacatcagccgctacgagcttcctgaatatgaagcggacgatattatcggcacgcttgccgtatctgctgaaaaagacggctttgaagtgaaggtcgtttcgggggacaaggacttaacccagcttgcaaccgggaaaacgaccgttgccattacgagaaaaggcattaccgacgtagaagattacacgccggagcacgtgcgggaaaagtacggtctgactcctttgcaaatcattgatatgaagggattaatgggagattcatccgataacataccgggcgtccccggcgtcggagaaaaaaccgcgattaagctcttaaagcagttccattcggttgagaaactgcttgattccattgatgaagtcagcggaaaaaaattaaaagaaaagcttgaagaatataaggaacaagccctgatgagcaaagagctggcgacgattatgacaaatgcgccgattgaagtcaagcccgaagatttagattaccaagggtttgaccgtgaacaagttgttgccatttttaaagacctcggttttaatacgcttcttgagcggctcggtgaagaaagcggggaaacggcggaagaaaattttgaagacatcaatgtcgaaacagcagaagaaatcaccgaagatatgctcgtttcgccgtccgctttggtcgtcgaacaaatcggtgataactatcacgaagaaccgatcctcggcttttccatcgtgaatgaaacaggtctttattatattccgaaagaaatcgccattcagtctgaagcttttaaatcttgggctgaagatgaatcgatgaaaaagtgggtgttcgacagcaaacgttccgtcgtcgctttgcgctggcagggaattgagctgaagggaacggaatttgacgcgcttcttgctgcctacattataaacccgggcaattcgtacgacgatgtcgcgagcgtagcgaaagaatacgggctgaatatcgtttcaaaagatgaagcggtatacggaaaaggcgcaaaacgcgccgttcccgctgaaaaagagcttgccgatcatctcgcgcggaaagcgtctgccgttaacagcctccgtgacaaactgcttgacgctttggaagaaaataatcagcttgagctttatgaagatcttgaactcccgcttgcgctaattctcggagaaatggaatcaatgggcgtcaaagtggatgtggaaagactgaagcgaatgggagaagagctcaaggcaaaactgaaagaatatgaagaaaaaatccatgacatcgccggtgagccgtttaacatcaattcaccaaaacagctcggcgtcattctgtttgaaaaactcggcctgccgccagtaaagaaaacaaaaacaggctattccacttcagctgatgtgcttgagaagctcgcagacaaacatgatatcgtcgcgtacattctgcaatacagacaaatcggcaaactccaatcgacttatattgaagggctgctgaaagtcacgcgcaagggttctcataaggtgcatacacgattcaatcaggcattgactcaaaccggacgcctcagctcaacggatccgaacctgcagaatattccgatccggctggaggaagggcggaaaatccgtcaggctttcgtaccgtccgaaccggactggcttattttcgccgccgattattcacaaattgaattaagggtgcttgcgcatatttcaaaagatgaaaatctgatcgaagcgtttacgaatgatatggacattcacacaaaaaccgccatggacgtgtttcatgtcagtgaagatgaagtgacacaagcgatgcgccgccaggcaaaggccgtcaatttcggcatcgtttacggcatcagtgattacgggctgtcgcaaaacctcggcatcacccggaaagaagcgggcgcttttattgaccgctatttggagagcttcccgggcgtcaaggcgtatatggaagaatcggtgcaggaagcgaaacaaaaaggatatgtgacgacacttatgcagcgccgccgctatatccctgagctgaccagccgcaacttcaacctgcggagctttgcggaacggacggccatgaatacgccgattcagggaagcgccgccgatattattaaaaaagccatgattgacatggcagctgagctgaaagaaaaaaacctgaaggcgcgactgttgcttcaggtgcacgatgaattaatttttgaagcgcctaaggaagaaattgaaatattagagaagctggttcctgaagtgatggagcatgctttggcattagacgtgccgctgaaggcggattatgcttcagggccgtcttggtacgatgcaaaataaacagaaaaaaaggaagtgatgattgtgccggaattaccagaagttgaaacggtccggcgcactctgaccggtcttgtgaaggggaaaacgattgaatcggcggatatcagatggccgaatatcatcaaaaaacccgccgagccggaggaattcgcgcggcagattgcaggagaaacgatccgatccatcggaagaaggggaaagtttttgcttttccatttggatcattatgtcatggtgtcacacctgcgtatggaggggaaatacggtcttcatcaggccgatgagcctgacgataaacatgtgcacgtcgtgtttcacatgacggacggaacacagctccgctaccgggatgtccggaaattcggcacgatgcatttgtttgcgccgggagaggaacggaatgcattaccgctttcacagctcgggcccgaacccgatgatgaagcatttaccgccgcttatttaaaagagcggcttgcaaaaacgaaccgcgcggtaaaaaccgccctgctcgaccaaaaagcggtcgtcggcctcggcaatatttatgtcgatgaagctttattccgggcgcgtattcatcctgaaacaaaagcgaacagtctgtcggacgggcagataaaaacgcttcatacagaaattaaagacacccttcaggaagcgattgacgcgggcgggagcaccgtccggtcttatatcaattctcaaggggagatcggaatgtttcagctcaaacattacgtctacggcaaaaaggatgaaccgtgcaaaacgtgcggcacgatgatttctaaaatcgtggtcggcgggaggggcactcatttttgcgcccgctgccaaaaaaaatcataaactgaagctgttcaagcaggcggcagcagaatgacttttttctaacacagttgatgacctttctccatatatatattgtgattcacccaataggcatatgtcacaattgccgatcaagagaaagggagaaacggatatggagattgtttctttgctgcttttggcttttgctgtcagcttggacagtttttcagtcgggtttacgtacggtttgagaaaaatgaaaatcccgttcaaagcgattgccgtgatcgcctgctgttcagcctctgtgatgtttatatccatgctgatcggccattttctgacaaagatttttcctgtatccgtcacggagaaactgggcgggctgatcttaatcggaataggggcatgggtcatctggcaattttttaaaccggctaaagagccggattacttattgcatgaaaaaacgctgcttaatcttgaagtgaaatcgctcggcatcgtcattcatattttgaaaaaaccgaccagcgccgatattgatcaatccggaaccattaacggagtcgaggcgcttctgctcggtatcgccttatccattgacgcgtttggcgccgggctgggagcggccattctcggcttttctccggttatgatgagcgtgactgtcggggtgatgagctcgctgtttgtttcactcggcataaacgcggggcatttgctttcaaggtggaattggatagataaaatgacatttttgccgggagtcctgctgattatcatcgggatttggaaaatgtaagaaggagtgggctttttgagcttggtcatcggtttaacgggaggcatcgcaagcggcaaaagcacggtagcgcgtatgctgatcgacaaaaaaataacagtcattgatgcggatgtcatcgcgaaacaggcggtggaaaaaggaatgccggcttacggacaaattgtggaagcattcggaaaagacatcctgctggaaaatggcgatattgacagaaaaaaactcggttctatcgttttcactgacgaacagaagcgtctgaagctgaatcagatcgttcatccggcagtgcgtgcggaaatgctgaaacagcgggatgaagccattgcgagaaaagagcagttcgtcgttttggatataccgcttttgtatgaaagcgggcttgattatcttgtcggcaaagtgctcgtcgtcaccgtaccggcagacattcagctcaaacggctgatggagcggaattccctgacagaagaagaagcgatgagccggataacgtcgcaaatgcctttagcggacaaagcaaaaaaagctgacgccgtcattgataacagcggcagtcttgaatatacaaagcaccagcttgaggaagtattgagcggctgggcataaacaaacaccgttcggaaagccgaacggtgtttttctggttaaaaatcaaaattgtcagggtccggaccgacacggagattttcgttcagatcatcaatccgcttcatatcttcagctgacagttcgaaatcaaagacatttgcattttcttcaatacggtgttttttagttgatttcggaatggtgatgacaccgttttgcaaatcccagcgcaaaatcacttgagcggctgatttgccgtatttctcagcaatctcctgtaatacggggtgatcaagcagctgcccttgcatcaatggcgaccacgcttcaagctgaatgccttgttcagtgcagaaagcaagcagttctttctgtgtcaggcgcgggtggtactccacctggttgatcatcggcttgatttccgtttctttcatgagatgtttcaggtggtgaatttggaaattgctgaccccgatcgccttaatgcgtccatcccggtagagggtttcgagcgcccgccacgcatcgatgtactttccttcgacaggccaatggatcaaatataaatctaaataatctaaaccgagtttttctaagcttgtgtcaaacgcttttaacgtttcttcatatcctaaatcggcattccatacttttgacgtgacaaaaatgtcttcacgttttaatcccgcttcttgcagcccttggcggatcccttcgccgacaccttcttcatttccgtaaatcgcggcggtatcaacgctgcgatagccgtgcaccaatgccgttttcaccgcgttgacgagttccgcgccttcctctactttgaaaactccgatgccgaaccaaggcatctctactccgttatgcaatgttgcttttgcttgtaaatgtgttgtcatgtatatattcctcctattatttgtctgtcgaaaaaaatcaaaatgcgctgaagaaaaactcacctcctttcaagggcagtgcgatcccgcttttccagcttcctgctccatccggttaatacgaccgcgctgagcaccatcagcgccccgatccaagcggtatgaatgattccgattgagtctgtaatgattccgccggcaaacgagccgatcgcgattccggcattaaatgccgcgatatttaaggctgatgctgtatcaacggcgcttggcgcaaaacgttcactcagcatcacgacatatacctgaagccccggcacattcataaacgccaacagccccatgaaaataatggtgatcagcccggctgttttaaacggcgcggtaaaagtcaggacaaacagcacagctgcctggacaatgaacatataaaacaaggctttcagcggattccggtttgataaacggccgccaatcatgtttccgatggcaatcgcaattccgtaaatgagcaggatggccgcgacggtttctttctgaaaacccgttacctcctgaagaagcggagataaatacgtaaacacgacaaacgttccgccgtagcctaacgctgtaataataaataaaagcaataaccggccgtttgtgacgagtttgacctgctcggaaaatgcggttttcgtccctttgcgcaaatgagacggaacgagaagcgcgtttgtgaggaatgcgatgattcctaccgccacaatcacggcaaatgcgattctccatccgaattgctggccgagataggtgccgaacggaacgccggtcaccgtagccaccgtcagccccgtgaacataatggaaatcgcgcttgctcttttatgctccggcacgatattggcggcgatcgttgccccgattgacatgaaaatgccgtgggaaaaagccgaaatgacccgtgccgccagtaagacgccgattgaggaagcgctcgctgcgagtgtatttccggcgataaaaatcaacatcacccagagcagcagtgttttccgcgacatgccggatgtgagagacgttaaaaccggcgcgccgaatgtcacgcccagagcatacatggaaacggtaagtcccgccgttgtcacaggtatatgcagatcttgagatataagcggcagcagtccgacgctgataaattcggttgtgccgatcgcaaaagcgctgacggctaatgccagcagcgctggtaaatagctttggcgatgtgaagacatctgttttcctccttaaacgataatgtatggttgaaatgatgccgggtaaacgatataagtataagagtacattccttttcagccggcaaatgtcattatgattgatagaagtgtcattgaaaagaacgtacttttaagtgccataggcactttttagttcctatagatgaggaggaattaccgttgctgaagaaaaaatacaatatatccgtagaggcggcgcttgaagtgatcggcggaaaatggaagtgtgtgatcctctgccacctcatgcgcgggaaaaaacggacaagcgaattgaagcggcttatgccggacatcacccagaagatgctgacacagcaattgcgggagctggaagctgacggcgtcatcaaccggatcgtgtacaatcaggtgccgccgaaagtggaatacgagctgagtgaatacgggcacagtctggaaagaattttaaatgcgctgtgtgactggggcgcgatgcatattgctaaacggtacggcgaggtgtcttccgttttagaggacagcattttgaatgacaaatttaaagaaccgggacaaatataagaaaaaagcaggcagcctgagacgctgatcctgctttttttatggaagaaaaatcattttatatgcaaaaaaaccgattgaacaacatattgatcggtataagggtggatttttatcaagttgtactggcggatttcttttaatgtgttatactatatataaataaaggtaaattagagtggcatattaaaaaggggtgacctgagcatgaaggtaaaagtagcaataaacgggtttggaagaatcggaagaatggtgttcagaaaagcaatggaagatgatcaaattcaaataacagccattaatgcaagctatcccccggaaacgcttgctcatttgataaagtatgacacaattcacggcaaataccatcaagaagttgagaccgccgacgacagcctgatcgtcaacggaaaacatattatgctgttcaatcgccgggacccgagagagcttccgtggaaagaatgcggaatagacatcgtcgtagaggcaacggggaaatttaattcaaaagaaaaagcgatgagccatattgaagcaggggcgaaaaaagtcattttaacggctccgggcaaaaatgaagacgttaccattgtcatgggagtaaatgaagagcagttcaatcccgatgaacatgtcattatttcaaatgcatcctgcacgacaaactgtcttgcgccggtcgtcaaagtgcttgatcaggaattcgggattgaaagcgggctgatgacgactgttcacgcttacacgaatgatcaaaaaaatatcgacaatccgcataaagatctgcggagggcgagagcgtgcggagaatccatcattccgacttctacaggcgccgctaaagcgctgtcgctcgtgctgcctcatttgaaaggaaaacttcacggtctcgctttgcgtgttcccgttccgaatgtgtcattagtggaccttgtctgcgatctgaaaacagatgtgtcggccgagcaagtgaacgccgctttccaaagagcctcaaaaacgtcgatgtacggaattcttgattattcggatgagccgctcgtttcttcggattataatacgaattcacactctgcgatcatcgacggactgacaacgatggtgatggaagaccgaaaagtaaaggtgctcgcctggtatgacaatgaatggggatattcctgccgggtcgttgatcttatccgtcacgtcgccgcgcgaatgaaacacccgtcagctgtgtagactaaagatcatggacatttgttagaaaaaaacccttaacggcatattcgcaaaaaacacaccttgcaaaataaacttaaacacagtatactatctttcgtgaacttcttgctcgtgactgcttcggaattacttaaagggttaggacctctccggactaactttcccccgtggtaaatggccgggtcagttctcggaaattcacttttttaattcttgttaaggggggtccatgattatggaaacaatggggcgtcacgtcatctccgagctgtggggatgcgattttgataagctcaatgacatggattttattgaaaaaacgtttgtaaatgctgctttgaaatcaggagctgaagtgcgcgaggtcgcatttcacaaatttgcaccgcaaggcgtaagcggagtcgttattatctctgagtcacatttaacgattcacagttttcctgaacacggatatgcaagcattgatgtttatacttgtggagacctggatcctaatgtggctgcggattacattgcggacgcattacatgcagatacaagagaaaacattgaaataccgagaggaatggggcctgtacagattaaacaggcacaagcgaaagtactgtaattttcaaaacgcaaacacaagggagctaagctgaaaaagccattacgcgctttgaagctgatgctccttttctaatgtaaaaaaacagcattgctttttctttaagcattttttttgtaaaatagaaaagataaggccggtctatcggctctcccaacaaataggctcatcctagaaacgttggcgggcatttaccggaagcttgcgaaccgcattacagcaacgaaacagatgggagctgatccaatttgaaatgtccttcatgccagcataacggttcccgcgtacttgattcacggcctgcggacgaagggaaatcaatccgcagaaggcgggaatgcgaagcctgccattaccgcttcactacatttgagaagtttgaagagatgcctctgatcgtcgtgaaaaaagaaggcgtccgggaagaattcagccgtgaaaaaatgctgcgcgggttaattaaagcttgtgaaaaaaggcccgttcctttgaaaacattggaagacatgtgctttgacattgaaaaagagctgagaaaccaaggcgtatctgaagtcaaaagcgaacttgtcggtgaaatggtaatggaccgcctggcgaaaatcgatgaggtgtcttatgtccgctttgcctccgtctaccggcagtttaaggatataaacgtgtttatcgatgaattgaaagatttaataaagaaagaacgctgagagagctaagagattgtgtctggctcttttctcatgagcaaaattggcatttgatagatcgcagaaacggtgtaaaatgagagtagaaacatatcggaaggtttgagaatcatggctgactattggaatgacgtattgcctgtagatccttatacggtcaaaagccgttcgcttcttcaggatgtcgacagacaggttttgacacatctgtaccagccgctgatcggttcttttgcattctccctttatatgaccttatggggggagcttgagcagaaccgcttgtggggagcggaatccacgcacaggcagctgatgggcatgatgcagtcaaatttaaaaaagattcatcatgaacagggaaagcttgaaggaatcggactgctgaaagtgtatatccgggagtccgagcaaaaagagcggatgtttatttatgagctgctgcccccgctcaggccgaatgatttttttgaagacggcatgctgaatgtctttctttataacagagtcggtaaaacgaaataccagcagctgagacaattttacacgcacccttccgtcggcgcgggcgcaagggaaattacccgtccgtttaatcacgcttttgcctcttttcagccgagtgaatggaaaatgacgcctgatatggaagaggcgatgaagctccccgaggactatgagacggcgtctgtcggacaagcgccttcctatacggtgacggaggaagtgtttgattttgagctgtttttggcggggttatcagaaacgatgataccgcgcaaatcaatcacacaggatgtgcgggagagcattaaaaagctttcatatttatacggaatagatcctatctccatgcagcacgtcgtcatgaccgcaattaatgagcaggatacgataacggccgaagcgctgaggaaagcggccagcgactggtaccaaattgaaagaagcggcaagcttcccgaactgattgataaaacacagcctgtcaccttgagagaaaaccggacggaaaaggacgattcattgaacggcgaactcatcgcacagcttgagaccatatcaccgagaaagcttctccaggacattgcggacgggaccgagccgtcaaaagccgacctgcagattatcgccgatattatgttcgaacaaaagcttgagcccggcgtcaccaatgtgctgatttattatgtcatgctgaaaacggatatgaagctgtccaaaaactatatccaaaaaatcgccgcccactgggccagaaagaaagtcaaaacggtacgggaagcaatgaagctcgcaatcgaagagcacaggcaatatcttgattgggcggacggcaaaacaaacggcgcggcgcgcggcaaaaaaaccgtccgggaagaaaagcgccctgattggatgaaagaagaagaaaccgggaagaaacaagaacagacggctctttccgcacaggatcttgaagaacagaagaaaaaaatgatggaagaaatgaaaaaactgaaaaaatactctgcctattgagacagagaagcggggtgatattgaatggaaccgatcagccgatccttagaaggcgtgacgaaaagacctgactttcaaaaacgcctggaacgaatgcagcagcaagttatggccgacgaagacgtccaggcttttttgaaggaacagaaagatgttatcaatcaaagcatgattgacagagggttaaataaactgtacgaattcgttcagcaaagtaaacagtgcgccttctgttcgaaagacagccggacgaacagcctgcttgaaggctaccatccgaagcttgtgatcaacgggcgttccattgatattgaatattacgaatgtccggaaaagagaaagctcgaccgccagaaaaggcaaaagtccctgatgaagagcatgtatatccagcaggatcttctcggcgcgacgtttcagcagatcgacattaccgatccgagcagactcggcattttccagcatgtgacggattttctgaagagctataatgaaacgggaaaaggcaaagggctgtatctgtacggaaaattcggaatcggaaagacatttattttagccgccattgccaatgaactggcggaaaaagagtattcatcaatgatcgtatatgttcccgaatttgtcagagagctgaaaaactcgcttcaggatcagtcgctggaggcgaaactgaatatggtgaaaacgacgcccgtactgatgcttgatgacatcggagcggagtcaatgacaagctgggtcagggatgaagtcatcggcaccgtgcttcagcacagaatgagccagcagcttcccactttcttctcgtctaatttttcaccagacgagctgaagcatcattttacgtattcacagcggggagaaaaggaagaagtaaaagcggcaagactgatggagcggattttatatttggcttcgcccgtccgtcttgacggggaaaaccgccgccgttcatgatgccggcgtccaatgggaaggatttgagggaatgaggaataagaaggctgtcacttgggctgcggctgcggcgggagcgggtcttttgctgtgggcaaaccgcaaatatctgaatctgtcgcctaaggagatccggctgtgggtgttatcgttcggtgtttttgcgccgcttgtgtttatcggaatttccatcgtcaggccttttgtgctgtttcccgtatcaatcgtttccgtcgccggaggattggcgttcggcccgtttttcggcaccatgtatacgctggcgggctcaatgggcgctgccgccgcgtctttttttgcggcggggctgtttgcctttaatgagaaaagccgtcatggaaaaatggaagccattcaaaagcagatgaaaaccaatggcttcttttatatttttatcctgcgcattctgcctgttaactttgatgtgatcagctatgccgcgggcctatcgaaagtcaggccggtaacgtattttttggcgaccgcagcgggcatcattccggggacgatcgtcctgaatgtgctcggcgcgagctttatgtccggcaatgtgctggccgtactctgcgtgatctgtctttacgtcgtatttttatcgcttcccgttatatttaaaaagaaggtgcgtcatttgttcggcggtgaaagctaacctttacgtctattttaaaaacatcccccatatacttgtaacagatgccgtaaggggggacaaatatgcttgaagtgatctttgaagatgaccacgataccgccgcttttttacatctcattcagcaatcggacgaccggagacattttattgtccgtgaaggcataaaaaaagtcggaatcgcaaggtctgaaacggctttttgcgttcagcgctttattgagccgatacttgtcaggttttttttggaatgcaaagaagacgagcatatgctttcgcttattgaggacgcatactgcttcaccgatcaggatgaacagcagcaaatccttcagcttgcacacagcattatggaaggagagcttgaggatcatccgtttgagccgaagaaagagccgcgcacacagtttatttcagatgcgctccgaacgatttcacttgatgcgggtgttttttccgtgcgttcgtttcagacgttccggctcggcaggtattatgagaggctcagagaatatacggaggccgcgatagatgaataccggatggaacaggaatatcaaaactttatccagtctctgagagattatgtgacatccaatccgccgcggatgaagaaagtccgcatcgtacatgaccgggcttttacgctgtgggagctgcgctatgtgtctgaacgggaacagaaaaaatacatagacagacggtttgtgcgggagcacccgatgtatatagattcccatctccttgcgccgctgatctccattgcgcctgagacggtcgaactgtatacggacaaaccggaacatatgatgtcaagaaccattcaaaacgtgtttcaggagagggtgcgcctttttccgctgggcgcgtttgcagccgagaagacggaaggatagccgcacggacggccttgtgtaagcggcagggctgtctgtgcgaaatcagacggaaaaccgagttgcatttttctcacagacattttataatacataaaagattaatgattgctacacgtattgataaggacatgaagcattgataccggctgtataagagaggagagcccaggctgaaagctttccagctatggatcattgtctttaccgcctttgaacttcagctgtgaacgccggaataagcgccagtaatagctgacgggaactcccgttacagagcttagagccgcagtgccgaagcaatcggccgcgcggaaaaaagggtggaaccacgattccgtttatttaacctcgtccctttcatagggggcggggtttttgatttgcataaaaaaaggagtgacgaagatgtcagatatgatcaacatcacatttccggacggagcggtaaaggaatttccgaaaggaactacaacagaagatatcgcggcatccatcagtccgggattaaagaaaaagtctttagccggaaaactgaacggacaggaaattgatttaagaacgccgattcaagaggacggtgccgtagaaatcattacagaaggcacagaagaaggtttgaacatcatgcggcacagcacggcgcatttattggcccaggcgattaaacgcatttataaagatgtgaaattcggagtcggccccgtcattgaaaacgggttctattatgacgttgaaatggagcaggcgctgacgccggatgaccttccgaagattgaaaaagaaatgaaacgcatcatcggtgaaaatctgccgatcatccgaaaagaagtgagccgtgatgaagcaaaagccatgtttgcggaaatcggcgataatctgaagcttgaactgctggatgcgattccagaagacgaaacggtctctatttatgagcagggcgaattttttgacctgtgccgcggcgtgcacgtgccgtctacaggcaaaattaaagaatttaagctgctgagccttgcgggcgcatactggcgcggcgacagcaaaaaccaaatgcttcagcggatttacggcacggctttctttaaaaaggatgacttgaaagagcatttgcgcatgcttgaagaagcgaaagagcgtgaccaccgaaaactgggcaaagaattaaaattgtttgccaactctcaaaaagtcggacaaggtctgccgctctggctgccgaaaggcgcgaccatccgccgcgtgatcgagcgctacattgtggataaagagctgagcctcggttatgagcatgtgtatacgcctgtcctcggaagcaaagacctgtacgaaacatcagggcactgggatcattatcaggatacaatgttccctccgatggaaatggacaatgaaacactcgtgctccgtccgatgaactgtcctcaccatatgatgatttacaaacaggacattcacagctaccgcgagcttccgatccgcatcgccgagctcggaacgatgcatcgttatgaaatgtccggggcgctttcaggtcttcagcgcgtacgcggcatgacgttaaatgacgcgcacattttcgtccgccctgatcagattaaagaagaattcatccgcaccgtccgtttgattcaagacgtatacgaagacttcggactgagtgattacacattccgcctgtcttaccgcgatcctgaagatacggaaaaatattttgatgatgatgagatgtggaacaaagcgcaatccatgctgaaggcggcaatggatgagatggggcacgactattatgaagcggaaggcgaagcggcgttttacggccctaaacttgacgtgcaggtgaaaacggcgatcggcaaagaagagacattgtcaactgtacagcttgacttccttcttccggaacgctttgatctcacttacgtcggagaagacggcaaacagcaccgccctgtcgttattcaccgcggcgtcgtatcaacgatggagcgtttcgttgctttcttaatcgaagagcacaaaggcgcccttccgacatggcttgcgccggtgcaattccaagtcattcctgtatcaccgtccgtgcatcttgactacgcgaaaaaagtgcaggagcgcctgcagcgcgaaggcctgcgtgtcgagcttgacagccgggacgaaaaaatcggctataaaatccgtgaagcgcaaatgcaaaaaatcccgtacatgcttgtggtcggtgaccaagaagcggaaaacggcgcggtaaacgtccggaaatacggcgagcagaaatcagaaaccgtctcattggacgattttgtgaaaaaggctgtagcagaagcgaaaaaataaccggaaatacaaaaaaccccgttcattcagaatggggtttttttgcgtataaaattatctttctttttgtttctctataatcgcaaacagctcgtgaagatcgctgatcacgtaatcaggcgcaatgtccgtatcatttttcttttgtgtccggtttacccagactgtcgtaatgcctgcccgtttcgctcccaatatatcagtattgaggttatctccgaccataatggcgtcttcttttttcaggttcaggaggccgaggcaatgttcgaatatggaggcatcgggtttcccttttccgaaagcgcctgagatgacgatttcattaaaataaggcgcgagctcaggaacgccggctagtttttctttctgcaggctgggatcgccgtttgtcagcagaagcaattcataaacacctttcagcttatcaagcaccgcaaacgtttcatcatacacatacgggcgctgtctgcgttccgccgcgaaaaactccgccaaatattcgccgtaagccgcatcgtctataccgacgctttttaagccgttcgtccaggcgtttcgtctgtattccggcgcaatccgattcagctgtttaaatccttcgctgaccggctcggaaaaattcgcccataatccttcaaacggattaatgccgatcatgaccgtataaggataggtttcgtatgacatatacaattcccgtgccgctttccgtaccgcctcttcaaatgtttgcgggtcaaggccatattttttttccgcttgtaaacatgtttccctgaatgttgttctgacgcttttttcatcccataacagtgtatcgtccaaatcaaaaaatacggctttcatgatcttctcctctttgttatattctgaaactctctgccgcaaggctcccgtttattctacaatagatacatagactgtgaaagatttgttttcagatgatttgaaaaaaacaggcaggtttgtgtcagattctgtctcgggctctaaaacgtgataaaataaaatttgaaagaacaggtgaaaagtatgctgcatttgatcatcatgatgctggaaagagtcggaattatcgtcatattgggatttgttctggctcataccagattgttcagacaggcgctccagcagcctgagagctataaaggcaaagcggtgctgatttcaattttctcgctgttcagtatcatcagcaactatacgggaatagaaattcagcagaatacaatcatgaataatgactgggtgtttcaaattaatccgtccggttcaattgccaatacaagaattatgggcgttgaaatcggcggactcttaggcggcccctatgtggggatcggcgtcggcatactggccggcctgcatcgtttatcactcggcggcgcgaccgcagtcagctgtgccgtctcatccgttttagcgggcattttgtccggctggatcggacggtatttcagaaaacgctacaggatgccgacaccgcgtgtggccgcgcttgtcggactcgggatggaatcgctgcaaatgctgctcatcctcttgatggccaagccgttttctgacgcttggacgcttgtgagcatcatcggcatcccgatgatattggtaaacgggtcagggacttttatttttctttcgatcattcagtcgattatccggaaggaagaacgggcgagagcccttgaaacccacagggtgctgatgattgccgatcagacgcttccgtatttccgccaggggctgaatgaaagctcatgcaaaagcgtcgccgccatcattcacaggcaaacaggaacggacgcggtatcgcttacggataacgaaaagattttggcgcacgtcggcgcgggtgccgaccatcatattccgtctgaaagcctgattaccggattgtcaaagcgcgttattaaaacgggtcatattatgaaagcgacatcaaaggaagaaattgaatgcacgcacgatccctgtccgctgcatgcggcgattgtattgccgctgacgtcaaacggcaaaacgatcgggacgctgaaaatgtactttaaaagcccgtcaggtttaagccgggttgaagaagagcttgcagaaggactcgccatgctgttttccacacagcttgaactcggcgaggcggaactgcagagcaaattgctgaaagacgcagaaataaaagcgcttcaagcacaggtcaatccgcattttctgtttaatgcgatcaatacgatttctgctctttgccgtacggatgtagaaaaaacccgaaagcttctgctgcagctcagcgtctatttccgttccaatctccagggggcaaggcagctgctcatcccgctttctaaagaactgaaccatctgcaggcgtatttatcattggagcaggcccgttttcctgggaaatataaaatcagccttgaaatcgaacgcggtttggaggacatcgaaattcctccttttgtgctgcagattctcgtcgaaaatgcgcttcgccatgcattttcaagaaagcaggacagctgtgccgtcaatgtgagcgtggtatccgccggtcagtcggttttaatgcgggttggagataacgggcggggaattgatccggaattgctgtccgtgctcggaaaccgtccgctcccgtctaaagaagggacgggaaccgcgctttacaatttaaatcagcggctgatcgggctgttcggccccaaggcagccctgcgattggaaagtgaggccggcaaaggtacggacgtatcatttgagctgcctttgaaactgatgactaaaggagaagaacatgctgaaggtgttaatcgttgatgatgaaatgctggcaagagatgaattagcttatttgctgaaacggacgaatgaagtaagtgacataaacgaagctgaaaatattgaatccgcttttgacagtatgatggatcaaaaaccggatctgctgtttttggacgttgatttgtcaggagaaaacggatttgatattgccaaacggctgaaaaacatgaaaaatccgccggccgtcgtttttgcgacggcgtatgaccaatttgctttaaaagcttttgaagtcgacgcactcgattatttaacgaagccttttgatgaagaaagagtgcgccagacgatcagaaagtttaaaagagtgaagcaggacagggcaggagccgtctcggagctgccgtccgcagccggagcgcataaactggctgtatcagccggtgaatctattgtcattttagatacgaaggacattatttacgccggcatggaggacggacacgtttccgtcaaaacgtttgccgcgtcttattccgttcatgaaactttggcggtcattgagaaaaaactgcctgatacgggtttcttgagagtgcaccgcgcgttcatcgtgaatacggagcatattacggaaattcatccgtggtttaattcgacttacaatctgatattaaaagacggttctaaaattcccgtcagccgtacatacgccaaggacttaaaaaagctgcttcatattatatgaggcggcttttgcatttcagcagccgttttttgcatttcagaatgaatattcagccgtttgttatgaaagcgctttaaaaatcgatttctcttttataatggacctaacaaagagaaagaggtgaagaaaatgagtgcgaaaaaagtgtacggatttctgacacaagcatttatttttgccgtagttatgctcatatctaatgggattgcagcgattgtccccattcctatacccgcttccgtagtaggtttggtgttattatttgtcctcttatgcctgaaagtgattaagcttgaacaagtagaaacgctgggaacatcattaacgtcactgatcggatttttatttgtcccgtcgggcatctccgtgatgaattcacttggcgtcatgcagcagtacggcgtgcagatcgcactcgtcatcttactcgccaccatcattctgttaggggcgacaggccttttttctcagctgatcttgtctgtcagccaaaaacgtcagaaggctgctccggctgataaacaaacggtgcgccgttccaatcaggaaaacgaacttgtgcagcattaggagggaaaacggatgagtccatatttcggtattgtcgtttcacttgcggcctttggcatcggcacgtatttatttaaaaaaacgagaggctttttcctcttcaccccgctgtttgttgcgatggtgcttggaattctttttctgaagctcggcggtttttcgtatgaagattataaaagcggaggagacattattaaattcttcctggagcccgcgacgatcgcttttgccatccctttatacaaacagcgtgccaagctgaaaaaatactggtggcagatcatgtcttccatcattgtcggctctatctgctcagtcacgattgtctatttgatcgcaaaaggcattcatctcgacgcggccgttatgaaaagcatgcttccgcaggcggcgacaacggcaattgcccttccgctgtcaaaagggatcggcggcatcaccgacatcaccgctttcgccgttattttcaacgccgttatcgtctatgctcttggcgctttattcttaaaactgtttaaagtaaagcacccaatctctaagggactggctctcggcacatcaggacacgcactcggtgttgcggtcggcattgagatgggggaagtagaagcggcaatggcaagtatcgcggttgtcgtcgtaggagtggtgacggtgctggtcattccggtattcgttcagctcatcggaggataaacccgggtcatagacccgggttttttattgtgttggcacgtccgcgggcggcaaagaacgaaatttcacatttttccttgcgctcaccccggcatcgtgttaaaatgaaaaagttgatccggagaagtcattcttgactaatgatccggtattgtgtagaatagttattgaattgaatataaatcacaagcagaggcacccgcttctcacctgattgacacattcatgtagttggcaggttgaccgtacatttttatttatgcagatgttcgtagtgtgggtgtgttgtcatgcccgcactttttgtttgcctgcagaatgcagtcaaaaagcgttgtgaatcaattcgaagaaactatggaggtggctcattattagcaaagatcaattggttaatgagggtatccgtgcacgtgaagttcgtctgatcggacaaaatggcgatcagctcggcatcaagtcccgtcaggaagcacttgaaatcgccggccgcgcaaatcttgaccttgtgttagttgcagcaaatgcaaaaccgcctgtctgccgcatcatggactacggtaagttccgattcgagcagcagaaaaaggacaaagaagcacgcaaaaatcaaaaaatcattaacttaaaagaagttagattaagtccgacgatcgatgagcatgactttaacacgaaattgcgcaatgcgattaaattccttgaaaaaggcgataaagtgaaagcttctatccgctttaaagggcgcgcaatcactcataaagaaatcggccagcgcgtattggaccgtttctctgaagcatgtgcggaagttgcgacagtcgaaacaaaaccaaaaatggacggccgcagcatgttcttaatgctcgcgccgaaaaacgaaaagcaataaggaggaaatcccatgccaaaaatgaaaactcaccgcggatctgctaaacgttttaaaaagacaggttctgggaagttaaaacgttctcatgcatacacaagtcacttattcgccaacaaatcccaaaagcaaaagcgtaagcttcgcaagggtgctattgtgagcgcaggagacttcaaacgcatcaaacaacagcttgccaacatcaagtaatcggacaaggaacaattaggagggaaatctaatgccaagagtaaaaggcggaactgttacacgtaagcgtcgtaaaaaggttcttaaattagcaaaaggttatttcggttcaaaacatacattatacaaagtagcaaaccagcaggtcatgaaatcaggaaactatgcattccgtgaccgccgtcagaaaaaacgtgatttccgtaagctttggatcactcgtatcaacgctgctgcacgtatgaacggtctttcttacagccgtttaatgcacggtcttaagctttcaggcatcgaagtaaaccgcaaaatgcttgctgatcttgctgtaaacgatcttactgctttcaatcagcttgctgatgctgctaaagctcagttagacaagtaagttgaaaaagccgctctctttccgggagcggtttttttacgtaaagggtgacaatcaatggctctcttcatttacgccgtattgataaacggatacggcttttggatcatgggcgctgataaaagaagagcaaaggcgcacaggtggagaatatcagagaaacgaatatggctcacagccgccatgttcggctcactcggcgtatggatcggcatgcgcaccttcaggcataagacgaagcacaaatcctttttatacggggtgccgctgctttttctcactgaagccgcccttgtgctcatgtatttgatgtataaaaaataaaaagcaggagagcttatcgctcgcctgcttttttcgcttttttgatgggctggtcccaatcaatcttgcaattcggataccgctccaatacctttttttcgacttcttcaaaatcatctgcagaaaagcggttcagcttttccggattttcggtccatacaaatattgtatggataaacagcggatgatctttggaagggatatgcttttctccttcaaagagcactcctttataagtaagctggagattttttcgcgtgtttttctgttcgtcaataaaataaaaattctcttttgattgcgccagtctgagccttcttttcgggtttgcgtaaaatttgacgcacatgtaaataaaataaataagaagtgcaagcaagacaatcctcaatactgtaatggccatatgtgtgaaggcacctcctcacctttgtcatgatctgatgtaatacgaaaaacaaaacaaaaagtttcatttttttaaaagaaatagataaaaacatttacccgtttttcaggcgaattaatcgtatgcttcagcattggttttgtataataagaagggtagtgaaaaaaaggaggtttattgatgacaaaattagatgaaacgctcaccatgctgaaagcgttaacggatgcaaaagggataccgggaaatgagagagaagtaagacaagtgatgaaatcatacatagaaccatttgccgatgatgtcacaacagaccggctgggaagtttaatcgccaaaaaaaccggcaaagaaaacggtccgaaaatcatgatctcagggcatttagacgaagtcggttttatggtgacgcaaatcactgataaaggctttctccgctttcaaaccgtcggcggctggtggtctcaggtcatgctggcccagcgcgtcaccgtcgtgacaaaaaaaggggacatcacggggatcatcggttcgaaaccgcctcacattctgcctcctgacgccagaaaaaaagccgctgatattaaagagatgttcatcgatatcggggcgtccagccgtgaagaagcaatggaatggggcgttcttccgggtgatcagattgtgccgtattttgaatttacagtgatgaacaatgaaaagcatttattggcgaaagcgtgggacaaccgtatcggctgtgcgattgccatcgatgtattaaaaaatctgaaaaacagtgatcacccgaatgaagtatacggggtcggaacggttcaagaagaagtcgggctgcgcggggcgaaaacagcggcacatacgatccagcctgatatcgcgttcggtgtggatgtcggaattgccggagatacaccgggaatttctgaaaaagaggcgcaaagcaaaatcggcgaagggccgcaaattattctgtatgacgcgtcaatggtatctcacaaagggctgcgcgaccttgtcgtaaacacggcggaagaagcgggaattccgtatcaattcgattccattgccggagggggcacggattcaggttctattcatttaaccgcaaacggagtgccggcgctgtccattacgatcgcgacgcgctacattcacactcatgccgctattttgcatcgggatgattatgagaatacggtaaaattgatcacagaagtaattaaaaaattagaccgggaaacggttgaccgtattacttatcaataaagatacggaagaatctgcttttttaagcagattctttttttttgtctgtacaaatatgagccttgcgtctacaataagaaaagacatagaaaaatctgacaacatgtttttgaaagcgctttaaaaaaagggaggtttacaaatgaaaaacagattcagacgcatgatccgcttttcatgcgcagtcgttacagccggtctgcttctgatgtcttcatctccggcatctgccgcgttttggggggcatcaaatgaattgcttcacgatccgacaatggcgaaggaaggaaacacgtggtacgctttcggaaccggtttggaaggggagagggggcttcgcgtcttaaaggcgggcagcggcggcgtatggaccgttcagaaatcaatctttacttccccgctgtcatggtggggcaattatgtgccgaattacgggctgaatcaatgggcccccgatgttcaatattttaacggaaagtattggctgtattatgccgtttcttcattcggcaaaaatacctccgcgatcggtcttgcatcatctacaagcctcagttcgggaaactggaaggacgaagggcttgtcatccgttcgacaagcgccaataactacaatgcaattgatccggagctgacaattgataaagacggaaacccttggcttgccttcggttctttttggagcggcattaagctgacaaagcttgataaaaatacaatgaaaccgacgggatcactttattccatcgctgccagaccgaataacggcggagctttggaagcgccggccatcacctaccagaacggctactattacttaatggtgtcgtttgataaatgctgttcaggggtgaatagtacgtacaaaatcgcttatggaagatccaaaagcatcaccggcccatatctcgataaaagcgggaaaagcatgtctgaaggcggagggacgattcttgattccggcaatgaccgctggaaaggcccgggcggtcaagacattgtgaacgggaatattttagtgcgtcatgcgtatgatgccgaaaacagcggaattccgaagatgctcatcaatgatatcgattggagttcaggctggccttcctattaattgatcagccgggcatgtgtgtccggcttttttacttgcaataaaagattgacagtttgattcctccttaactataataaagttgttcgtacaaataaaagaataaaagttttattatttatattcgtacgtatatttatttaaaaatgcaagcgctttattttgatgggaaggggaaatgaatgtgcttcagaacaaagaatatgaattttggtttgtaacgggaagccagcacttatacggagaggaaacgctgcagcttgtcgataaacacgcaaagggaatatgtgacggtctcagcggggtgtcatcaagatacaagatcaggcataaaccggttgtcacgtcatctgaaacgatcagagaggttttgcgggaagcgcagtatcaagaaaactgtgccggggtcgtgacgtggatgcatacattttcccctgcgaaaatgtggattgaaggtctttccgcttttcaaaagccgatgcttcatctgcatacccagtatcatcgcgacatcccgtgggaaacgattgatatggactttatgaacagcaaccaatccgctcacggagaccgggagtacggatatatccagtcaagaatggggcagacgagaaaagtcatcgcaggctattgggatgatgaggaagtcaaacatgacatttcgcaatggatgaacacggctgccgcttggaatgaaagcaggaatattaaagtagcccggttcggcgacaatatgcggaatgtggcggttactgacggagacaaagtcggcgcccacattcaattcggctggcaggttgacgggtacggaatcggcgatcttaccgaggtgatgaacaatgtcaccgacgcagaaattgaggcgctttatgaggaatacgacaaattgtatgtcatcagcgacgaaacgaagcgggatgaagcaaaagttgcttccattaaagaacaggcgaaaattgaactcggattaacggcctttctcgaacggggcggatatacagcgttttcgacctcctttgaagttttgcacggaatgaagcagcttccgggtcttgccgttcagcgtctcatggaaaaagggtacggatttgccggcgaaggcgattggaaaacggctgcccttgtgcgaatgatgaaaataatggcggacggagaacaaacctccttcatggaagattatacgtaccattttgaaccgggtcgtgcgatgattctcggatcacatatgcttgaagtatgtccgacgatcgcccttgatcagccgaaaatcgaagtccatccgctctcaatcggagggaaggaagatccggcccggctggtttttaacggaatcggcggttcagccatcatcgccagcatcattgatatcggcgggcggttccgtctcattctgaatgaagcggaaggcagggaaattgatcatgatatgccgaatctccctgtggcgcgggtgctgtggaagccggagccatcgctgaaaacagctgcggaagcatggattctggcgggaggcgcccaccatacctgtatgtccttccggcttacggctgaacagatgcttgactgggctgagatggcaggcattgaaagcatctttatttcccgcaatactgaaatacatgagctgaaaaaagagctgaaatggaatgacgtattataccggctgggagggaattgatatggcgtatacgattggtgttgatttcggcacattgtccggccgggcggtgcttgtcaatgtccgcacgggcgaagaaatcgcgtctgcggtaaaagaatacactcatgccgtcatcgaccgcacgctgccgaagacgggtgaaaaactccctcgggactgggcgcttcagcatcctgccgattatatcgaagttctggaaacggcgattccgaacctgcttgagcaggcgggcgctgatccaaaagacgtgatcggcataggaattgatttcaccgcctgcacgattttaccgatagacggcgcggggcagccgctttgtatgctgccggaatttgaacgggagccccacagttatgtgaagctgtggaagcatcatgcggctcaaaaacatgcagaccgtttgaacacgattgccgaagacacaaaagaaacattccttaaaagatacggcggtaaaatttcttctgaatggatgatcccgaaaatcatgcaaatcgcggaagaagcgccgcatatatacaaggcggcagatcggattgtggaagcggcagactggatcgtctatcaattgtgcggttcattgaagcgaagcaactgcacggccggctacaaagcaatctggaatgaggagacggggtatccgccggatcattttttcgaaaagctcaacccgttaatgaaaacgattacacaggataaattaagcggcgcgatttattcagtcggggaaaaagcaggaggtttgaccgaaaaaatggcggagctgaccgggcttctgccggggacggccgttgccgtcgccaatgtcgacgctcatgtgtcagtgcccgcggtcggtattacagagccggggaaaatgctgatgatcatgggaacgtctacctgccatgtgctgctcggcgaggaagaacatatcgtccccggtatgtgcggggtcgtcaataacggcattttgcccggatatgcgggatatgaagcggggcagtcctgtgtcggcgaccactttgaatggttcgtcaaaacgtgcgttccgagagactatgagaaggaagctgaggataaacacatagacattcacgagctgctcagcaaaaaagcagcagaacttgttcccggggaaagcggccttctcgcgcttgactggtggaacggaaaccggtcaaccttggtggacgccgatttgacgggcatgatgctcggcatgacgctgcacacgaagcccgaagaaatctacagggcattgattgaagcgacggcgttcggaacgaggatgattatcgaaacgttccgggaaaacggcgttccggtcgaggagctttacgcagccggaggaatcgccgaaaaaaatccgtttgtcatgcagatttacgcagacgtcacaaatatggacattcaattatccggatctccgcaggcgcctgcactgggctccgcgattttcggagcgctcgccgcgggacgggaaaacggaggattctccaatattgctgaagcttgcgcgcatatggggaaattaaaagacggcttttatgccccgaaccgggaaagagctgagatttatgacagcttatatgcggaatataaagagctcgtacactacttcggcaaagaaaacaatgtcatgaaacgcctgaaagccattaaaaaccgtgattttgcgaaaggggggagccgccatgcttgaagcgttaaaagaagaagtgctcgccgccaatctgaagcttgaggaacataaccttgtcacgtttacatgggggaatgtcagcggcattgacagagagagcgggagaatcgtcattaaaccgagcggtgtcgattacagtgagctgaccgctgacaagctggtcgtcctgaatgaggacggagacattttggaaggctcgctgaaaccgtcttctgacacgccgacccatctttatctgtataaagcgtttccggctatcggcggaatcgttcatactcactcccgctgggcgacgagctgggcgcagtccggaagagacatacccgctctcggaacgactcacgcggattactttgaaagcgctataccctgcacgagggaaatgtatgaagaagaaattgtgaaagattacgagtatcatacaggcaaagttatagccgaaacctttcaaaacgaaccgtatgaacaaaatccgggtgtcctcgtccacagccacggcccgttctgctggggaacggacgcgctgaatgccctgcataacgccgttgtgctcgaaacggtagcggaaatggcctaccattcgcttatgctgaacaaacagctcagtccgatcgacagagtgctgcatgataagcatttttacagaaaacacggggcgaatgcttattatggccaaacttgacgcagccgggtttctgattgatttagacggaaccgtattcagggggcgggagctgattgacggcgcaaaagaagccgttcatacccttcagtcactgggcaaagccgttgtctttttaagcaaccgcggcaatctatcaaaagcaatgtgcagaaagaaactgctgggtgccggtatccgcacggatgaacggagcatcgtgctgtcctccagtgtgacggcatcatttttaaagaagcattatcctttgtcaaaggtctgggtgttaggagagaaagggctgactgatgaactcgctttagcgggtgtcgtcctggcgcaaaacccgcaggcggcagactggcttgtcatctccctgcatgaaaccgtcacctataaggatctgaatctcgcttttaaggcggcttcctccggcgcgcgcatcatcgccacgaacaaagaccgctcctttccgaatgaaggcggtcatgccatggatgtcgcgggaatgatcggggccattgaagcatccgccggagcaaaaacggagcttgtcatcggcaaaccgtcttggctgatggctgaggcggcatgtgaagcgctcggacttccccctgaggaatgcgccataatcggagacagcctcgaatctgatatcgcaatgggcaggctgtacggaatgaaaagcatattggttctgacggggtcggccaaacttggggagccccgtctatatgaacctgacatcgtccttgattctattaaagacctgacagaattagcgaaggagggaatccttttatgaaacgttctcctgaggacattcaatccgagtttgacaaggaaggggccagccgctcaccgattcaaatagaagatatcgtgatcggggcgaatgcaaaagaagagcttctcagatttctgcaaaaaaaatgctggaatcatccggtcatcgtctgtgaccggaacacgtacgaggcggcgggacgtctgcttgcggacgaattaagggcaggcggaatcaaagcgtcaaaagtcatcattccggagcatgaagccggggccgccgcggctgatgagaggacattggtctatacgctgatcaatctcgcggaagagacggatgttatcatagcggccggttcaggaacgattcacgacattacgcggtttgccgcttatcagcgcggattgccgtttatctcattccccaccgctccgtcagtcgacggttttacatcggcgggagcgccgctcatattaaacggaatcaaaacgacgattcaaacgaaagcgcccatcgccttatttgccgatacgaatgtattaaaagaagcgccccgttcaatgacagccgcgggcttcggagacatgctcgggaaaataacatcgctggctgattgggagatttcccgcaggcttgcgggtgagccgtactcagaagccggggcgaagcttgtgaaagacgcgctttggcagtgcattgatcaccgcgctgacattgccatgggaacggaggccggcattcagatactgatggaagcgctgatcgtttcgggtcttgtcatgcttgctcttgaccactcccgccccgcctcaggaggagagcatcacatctcgcattggattgagatggaaatgctgaaggcaaaacagcctccgattctccacggtgcgaaggtcggctgtgcgtgcgcggtgctgagtgatatttacaaagaactggcttgtcacgaaaagcttgctgaactgccgccgcactttcgcgaggcgattcagtccgcatatgaagggcttcccgacggcaaaacaattgccgggtggctctcatctgcgggaggtcccgcctgtttcgatgagatcggtgtaaaaaaggaccttgtcagcgatgcgcttaagcatgcgcacacactgcgagaccgttataccggtttaaccatcataaatgaaaatgcagcgctctttgcacatcatttgcatcaatagccgcacggcctaaagtggaaggggtaatgacatgaaaaaaacgaccgctgtatgtttggtgctgatgatgctcttcttgtttaccgccggctgttcacaagaacggactgccggccggccgggagaaacggagctgacgttttggacgtttaacggtctgcacgaacagttttatcaggaaatggtcaaagaatggaatcagaagtatccggatcgcaaaatcaagctgaataccgttgtttatccttatggacaaatgcatgataatttatcggtttcgctgatcgcgggtgaggggcttcccgatatagccgacgtggaattaagccggttctcgaactttctgaaggggaaggatatcccgcttgccgatctgacgccgctgattgaaaaagaccgcgataagtttgtggaagcgcgtctggccttatacagcaaaaacggaaaattgtacggccttgatacacatgtggggacgaccgtcatgttttacaacatggatatcatgaaaaaagcgggcgttgatcccgcctccattaagacatgggaagattaccggcgggcaggaaaaaaagtgcgtgaagccgctgggaaaccgatgggaacggttgaaacaaacgactccgccacattcctatccatgatttcgcagcaagggtcaggctactacagcaaaaacggaaaattgattctgaacagcaagacgaatacagatacactgaatgatgtaaaggacatggtaaatgataaaacccttctgccggctcccggcggcggccatcacagcgaagaatactacggttttatgaatcagggcggggcagcctcagtgctgatgcccatttggtacatgggacggtttatcgattatatgcctgatttaaaagggaaaatggcgatttaccctatgccggcctggaaagaaggcggtgacagatcagcgggtttaggcggaacagccaccgtcgtgccgaagcaggctgaacatctggagctcgcgaaagaatttctcggatttgcgaaaggttcaaaggaagggaacataaagctgtggacggtgctcggctttgacccgctccgctgggacgtgtgggattcaaaagaattgaaggagaaaaacaagtacacggatttcttccggaacggtacgtcaattttttcctcgctccttgaaataaaagatgagatcaatccgatttatctgcatgaagacttctctaaagcggctgatctcgttgtcagacaggtgctgttcgatgcgctgaagacgcaggaaaaaacacctgaggaagccttggacgaggcggcagagcaattagaaaaataggagaagccgccctatttaacagtgaaagcgggggagcttttatgagacctgtaaagacagagacagcgcaaaccgtttctgcagtccggaagaagccgcgccggcgcaatgtgctgtattcaaaaaaagcggcgccttatctttttacggcgccatttatcatttcgtttctcgttttctttttgtatccgatcatcagcgtgtttatcatgagctttcagcggatactgccgggagaaattacatttgtcgggttttccaattataccgctcttcttaatccaaccttttatacggcattatttaacacattggaatatactttctggacgctgatcgtgctgattccggtgccgcttcttttagcggtgattctgaattcgaagctcgtcaggttcagaaatgtgtttaaatcggctctgtttgtaccggctttaacatcgacgatcgtagcggggattattttccggctgatgttcggagaaatgaatacgtcgcttgcaaacgagctgatgatgaagcttggcgcatcaccccaaaactggctcaacaacaaaggtaccggcatgtttttaatggtgctgcttgcgtcatggaggtggatggggattaacattctttactttctggcgggtttgcaaaatgtgccgaaagaattgtatgaggcggctgaaattgacggggcgagtacgtggaaaaagttccggcatatcacccttccatttttaaagccggtgtccgtttatgtgttaacgatcagtatgatcggcggtttcagaatgtttgaggaaagctatgtgctttggcagaataattccccgggcaatatcggcctcacgcttgtcggttatttatatcagcaggggcttgcatacaacgaaatggggtacggggcagcaatcggaattgtccttttgcttgtcatcttactagtcagccttgtttcactgaaactgtccggttcgtttaaaggggagggataagcgttgcgtaacaatcacatgttttccgtgtacagagtcgcgtttaccttgttttttatcatgctgagcctgttgtatatctttccgatgatctgtctattgctcggttcattaaagccgtcatctgagctgatgcgcatcgggctgaatctgcgtcttgatccggatgtgatgagccttgataactacacctatttgttcaacggggggagcatttattttaaatggttttttaacagcctgctgctcggcgtcctcaccacggttctcacgctgtttttttcctctttgatcggctacggactcggtgtctacgagtttaaaggcagaaatattattttcgttcttgtgctgatcattatgatggtgcctcttgaagtgatgatgctcccgttgttcaaattgacggtgggtcttcatttaatcgattcttatacgggggtgattctgccgtttattgtgtcgcctgtcgccgtgttctttttccggcaatatgcgctcggacttccgaaggatcttcttgattcagcgagaatggacggctgcaccgaattcggcattttcttcagaattatggcgccgctcatgaaaccggcattcggagcaatgatcattcttcaatctttaaacagctggaataactttttatggccgctgatcgtgcttcggtcgaaagaaatgtttacgcttccaatcggactttcagggctgctgagtccgtacggcaacaactatgacatgctgatttccgggtccgtttttgcgatactgccggtgatcatcatattcttgttttttcaaaaatacttcatttccggcctcacagtaggcggagtgaagggatagagagagggaggaaatgtaatgaaaaaagcggggattacagcagataaagaatatatcatcggtgaagtggacaaacggatgtacggatcttttatagaacatatgggccgggcggtgtatgaaggcatttatgagcccggacacccgaaagccgacaaggacggtttcagaacagacgtgcaggagttaatcaaggaattgcaagtgccgttcatccgctatccgggagggaattttctctcaggctacaattgggaggacggcgtcgggccggtgaagaaccgcccgcggaggcttgatttggcatggcagacgacagaaacgaacgaagtggggacgaatgaatttttaacgtgggcgaaaaaagtgaacgccgaagtgaatatggcggtcaatctcgggacgagaggaatcgatgccgcccggaacctcgtcgaatactgcaaccatcctgaagggtcatactggagcgacttacgaaaatcgcacggatatgaaaaaccttacggcatcaaaacatggtgcttaggaaatgagatggacggcccttggcagatcggtcataaaacggcgcatgaatacggacggcttgccgctgaaacagcaaaggtgatgaaatggacggacccgacgatcgaattggtggcttgcggaagctcaaacagcggcatgccgtccttcatcgagtgggaggccgaggtgcttgagcatacgtacgagcatgtggattacatttcactgcatacgtattacggcaaccatgaaaatgatcttgagaactatttggcgaagtctatggatttagaccattttattaaatccgtcacagccgtatgtgattatatgaaagcgaaaaaacgcagcaaaaaaacgattcacctttctttagatgaatggaatgtgtggtatcactcaaatgaagcggataaaaaagtggagccatggattacggcccggccgattctcgaagacatctacaattttgaagatgcgctgttgatcggttcactgctgattacgatgctgcagcatgcggacagactgaagatcgcctgtctcgcccagcttgtcaacgtgattgcgcctatcatgactgaaaagggcggagaagcatggaggcagccgatcttttacccttacatgcacgcctcagtctacgggagagggacttcgatgaagctgctgatcacctccccgaaatacgactcggcggactttacggatgtgccgtatgttgatgccgcggccgtttaccatgaagaggatgaagcactgaccatttttgccgtcaacaaaagcaaggaaccgatggaaacggagatcaaactgagggggtttgaagattaccgcatcattgagcatatcgtgctggagcatcaggatatgaaagcaaccaatcaaaaaaacagaaaagaagtcattcctcactccaacggaacgtcttcggcaaacgctgaagggataacggcacattttactccgctgtcctggaatgtcatccgtttatcaggaaaataatgttccgaaaagccgggctgccgctgccggcttttttttacgcaaaaatcatctcctgttatctgataattatgataatatttagaaaaagagaaaaggggctgggattaaatgaatgcgattacaatcgtcatagcgtctatatgtattttggcgatcgcctatcggctttacggtacctttatgatggtcaaagtattaaaaatcaatgatcagacaccgactccggcccatgtgcttgaggatgggaaagattatgtgcccacgaataagtgggtgtcattcggccaccacttcgcggcaatcgccgctgccggcccgcttgtcggaccgattctggcagctcagtttggctatctgcccgggcttttatggctgttaatcggagcggtgatcgggggagccgtgcacgatattgtcgtattgtttgcatcaatgcggaaaaacgggaaaacgctttctgaagtcgccaaagaagagctcggcccggtggcgggcttttgcaccggtctttccatgctgtttatcattacgatcacgatggcgggtctgtccatggttgtgctgcacgcgcttgagaaaaacccgtggggaacgtttgcggtggggattacgattccgatcgcgatgggggtcggcctctactataaaaaaacgggcaatctcaaactcgcatcaactgtcgggtttcttttgttaatggccggtgttgtaatcgggccgcggctgcagacaacggctctcggggacatgctgacacttgatgcgaaaacgcttgcagtggcgcttcccgtctatgcgtttttcgccgcggcgcttccggtttggcttttgctggctccgcgtgactatttaagcagttttatgaaaatcggggtttttgccgctttgatcgcaggcgtctttttcgtcaatcccgccattaaattcccggccgtaacggagtttattcacggcggagggccggtgatcgcgggtcctgtctggccgtttatttcaataacgattgcctgcggcgccatttcgggctttcatgcatttgtcggttctggcacaacgccgaaaatgctggataaatggagtgatataaaaccggttgctttcggagcgatgcttgtggaatgtctcgtcggaattatggcgctcattgcagctgccgctcttgagcccgccgactattttgccattaacagcacgcctgaaatattccgcgccctcgggatgaatgtcgtccatctgcctgaattgagtaaagaaatcgggctcagtctggaaggaagaacgggcggagccgttacgcttgccgtcggaatgacgtatatctttacggagattccgtttttcagtcatttggcttcatacttttttcaattcgtcattatgtttgaagcggtgtttattttaacggcgattgatgcgggaacccgtgtcgcccggtacttgattcaagagtttttcggagaggtctataagccgctgaaaaaaacagactggctgccgggctcgattttctcaagcgcgctcgcctgcctgctgtggggctatcttctgtattcgggcgacatcagttccatttgggcgctgttcggcgtatccaatcagcttatggcatctgtcggcttaatcatcggtgcgaccgtcgtattaaaaatagcggataagcggcgctatatgctgacatgcctgattcctctcgcttatttgtacgtgaccgtcaactatgcgggttattggatggtgcggtatgtgtatttgaaccccgaagcggcgggatacaacgtgctgaatggcgttttatccattatcatgctgattctcgggcttgtgattatcattgcggctgtgaaaaaatgggcgaatgtatggcgtgatccgagtgccagactggaagcttcaatacccggataaatccgcggccgatccgaacattgtagcatcataaaggcagagagccgatcggtctctctgctttcggcttatgacaaatccgccgcttccaaaaggtaatccgccaaatgaaccgcgcggacacggcctgttaatccttcgcgtaaaatgccgagctgcatttgcagaaggcatccgggattggctgtcacgatgacggccgcctccgtttttccggcggctttcatcttgctgtctaatattttcatagacatttctgactctgttatattataaattcccgccgacccgcagcagctgtcggccttttccatttctctgtactcagcccctttaatgtttttcaaaagcgtgcgcggttcttctgacgtatgcatcacattgcggagatggcaggagtcctgatatgtgacgatatgaggagactgcgcccgcaggtttttttgatggaacttcagatcaaccagtacggatgaaaagtctttgagcttccggacgaattgttcggcacgttccgcccatccaggttcatctttcagtaaatgcggatattcctgaagaaaggcgccgcatccgccggcgtttgtaatgatataatcagcgtcaagcgcctcaaaagcggcgatattccgcttggccagttcttttcccatctctttttctccgctgtgcccgtgaagcgcgccgcagcacgcctggccgtccggaaccgcgatttcacacccggccgcctgtaaaagcgccgttgtcgcatgatttgttgctaaaaacatcgtatccattaagcagcccgagaaaaaagcggcccgtttttggacgggacccgcggcaggaagaaaacgcggcctttccttcatgtctttccgtttcggggcgggcgggagcacttgttccattgtgcgcagatgttcaggcaaaacgcgcagcataccggtttttctgatggcggtctgcagtcccgatctttggtatattccgagaagattcacggctgcctgcatgcggttttgatgagggaaaagcccggtgaaggcggctttccgcaagaggcgcacgccgggcttatgttttttattttgatgaatgatatccctcgcttcttcaagcagctgtccgtaattgacccctgccggacaaacgggctcgcatgcccggcatccgagacacagcgaaagtgagcgctcgacatcttcatccggttcgatcagtccgtctgtgacggctttcatcagggcgatccggccgcgcggcgaatgggattcttgaaatcctgattcgatataggtcggacaggaaggaaggcagaagccgcagcgcatacagttcagcaattcaccttcatccatgcggtttttgaattctgtttgaatgtgttgctgctctttagccgttgtcatttcatcatcaccacgcgtttccttgatgaattggcgaatatttttcccggattcagcagattttggggatcaagcgcttgtttgatcgctttcatggcggtaatgccttctgttttcagcttcatttctaaatacggcgcttttacgatgccgaccccgtgttcacccgttatcgtcccgcccagctcaatcgctttttcaaaaatggcggcaaaagctttttcgacacgttccatctcctctgtatttcggatatcggtggtgcacgtcggatggaggttgccgtctccggcatggccgaatgtgcagatggacaggccgtatgtttctgcaatctcgttaatggctttgaccatgccggcaatttgtgatctcggcacggtcgcgtcttccagaatcgtcgtcggtttcagccgggcaagggctgataatgcggaccgtctggcctctgtaagcgcgaatgcctcttcctcggtttcggccgtttggacggatacggctgctccgtttttacagatggcttcgattttttccatatctcgtctgaccgtttcgatgtcaccgtcctgttcgatcagcagcaccgcttttgcatcggtcggaagcccgatcttggcgtaatcttcaatgacctgcagtgtcggctgatccagaaattcgagtgtcgccggaatgattttttcagcgatgatggcagaaacagattccgcagccgcttcaatatgttcatagagtgcaagcagcgtttttttcgtttccggcttcggaaccagctttaaagtcgcttccgtcacaacgccgagcgtaccttctgatccgacgaaaagccgggtcagatcataaccggcgacatcctttgtcagcttccctcctgtgcggatgatatcgcctgaagccaagacggcttcaaggccgaggacataatcccgggtgacgccgtacttcaaaccgcgcagcccgccggaattttcattaatattcccgccgatcgtcgatattttcatgctgctcggatcaggcggataaaataaccctttcctttcaaccgcatgaatcatatcttgcgtgatcacgcccggctggacggttgccgtcaaattttcttcatcgatttcaagaatgcggttcatatgtttgaataaaagcacaagcccgccttcagacggacatgtgccgccgcataagtttgtgcctgaacccctcggcacgatcggaatgtcatgcctgctgcaaatcgttaatatacgggacacgtcatccgcgctgcggggagcgattaccgcatccggcatggcttgcagctgaggagccgcatcgtaagaatacacaagacggccagccgccgaatcatcataattctccttcccgaccgtccggatgaacgcttcttttgcctctcgtgaaatcatgttctccaacctccctgataagaaaagcgttttcatttaattgtaaagaaaaacgattcttcacactatggagaaacatatgaaaaatgatgatatgattacgtgctttttgtatgttgatctaaaaagcggagcgccaaataaaaagccgttatgtcttcggggcggtcaagcttcatatttgtcagtgattccagtttggaaagacggtagcgcaatgtattgatatgaatatgcatgtcgtctgcggtgcgctttaacgataattgccggtcgaaaaaggcgcgcagcgtatccagaagttcttcccggccgagtacatgctcgagaacccgccgtgaaaattccgacctcgtgccgggcgcgatatcggcaatacacatatccagttttaaatcttcttcaaagacggcctgcttgtcaccgattccggctgaaagtgctttatccgcctgttcgtatgattccgcgaggcgctctcccggaacgatccgtccgatgccggcggtgacaggctgcccaaaaacggcgccgatctttttgatgagctgtgttttggaagccgaatttgcttcatggttaatgagaatgcgttcatttccccagcggacaaacaggtcttcagggcattcgttctgccagagccgcccgagctcctccgctttatattgctcataacgtccttgaatgagtatgatccggcggtatgcgtgaaggtctgcgccgatgagctttgctttttctaaaaagcccggagaccattctttcagctgcagccaatcaaccataaaggattcaagcattctcgcacgccactgcgcttcttccatatggcgcgtttctttaataaacagctccgtcattttcctgagcaattctccgaaaggcaggatatcgtcagggtctcctgtcagaccgaacactccgattacctcatggcctgaaaaaacggggaggttcagtcctgcttttacgccctggaggcgtttttcatcttctttcgtaatgatgacattccgtttttcgcgggcgcagatcagtgcgccttcatgaaaccatccggcgcgcgcctcattggtgcccgcgatgatcatcccttttgtatcggcaataatcacttcgcggctgtacatatgtttgacttcggcaatcaatttctttgccagttccggctgtaactgcatggcgatccccctcgccattattatacaaaaaaaaccgggtgtgccatcacccggttcatgcttattgcgcaggttttaatccgccttcaagtgttttgagcatttcatttttttctgagtctgacgcatgctgccaaagaacttcgaataagacgccgaggcccggaagcattttttcttcaccgctttggatggcgtcaacgatagtatgctccagctgatcctggttattgccggttacattggcaataacggcgttgcgtaaattaagatccattacaaccgctcctttttcctgaatgtgatacgcatattcttaccgcgcacgcggtttattatgtgctgttcttgagatataataacaacatgcatgaaaaaaggagagcacagacataaagtgaaacgaatcgactctgcaaaaaaccaaaaagtgaaggactggaaaaaacttcacacaaaaaaagagagacttaaaacgaatacatttctgatagaaggagagcatctggcagaagaagcgctcaaatcaaagggaacggtaaaagaaattctcgtaaacgatgagagcgccattccggccgatctggatatgagcattccgtgctacgtgctgagcgaagacgcgttttcagccgtgacggaaacggaaacgccgcagcggatcgccgcggtctgccatatgccggataagcggcctgatcagctgaagcggctgcttctgattgatgccgtacaggacccggggaatttaggaacaatgatcagaacggcagatgcggcgggaatcgacgccgttgtccttggtgagggaacggcagacccgtacaacggaaaaacgctgcgttcagcgcaaggatctcattttcatattcccattttaaaacgtccgcttgatgagtttaccgccgagctgaaatcacaaggcgtcgcgatctacggcacggcgcttgaaaacggtgcggcttatcaaagcgtgaagcctgaagaatcgttcgcgttaatcgtcgggaacgagggggcgggagtggacgccggccttctgcaaaaaaccgatctcaatctgtacgttccgctgtacggacaggcggaatcgctgaatgtggcggtagcggccgccatcctcgtttatcatctcagaggataggttgcgaaaaaccttggatttcactataatagatagcaataatgtaaaaaccgtgacagaggacgtcaatttttgcacacgctgccttccagggagaaaatgccgctgactgagagcatttttatcgcagcacagaaattgattttcacctctcgagttgtcaccgggaccgcgccaaacgcgcgtaaaggtgaaccggaacgatcgtttccgttatgtcaatgaagctgtcggcagatgaagtctgccttaaaaagggtggtaccgcggccacaactcgtcccttctctcaaggggcgggtttttttgttttctgaaaaaggcatagaacggtttggtttacataaaaggaggatgcatgatggaagagaagcttaaacagctcgaactggaagctgcagaaaaagtagaagcggcgggttcattaaaagaagttaacgacattcgggtgcaatatctcggaaaaaaagggccgattacagaagttctccgcggcatgggcaaactgtccgccgaagagcgcccgaaaatgggagcgctcgccaatgaagtgagagagcgcattgcagcagccattacggcgaaaaatgaacagcttgaacaagaagagatgaataaaaaactcagcagccagacgattgacgtcacgttgccgggcagtcaggtaaacatcgggggacgccatccgctgacggtcgttattgaagaaattgaagatttatttatcggcatgggatataccgtcgaagaaggccctgaagtggaaacggattattacaactttgaggcgctgaacctgccgaaggaacatccggcccgcgacatgcaggacagcttttacattacagaagaaatgctgatgagaacgcagacgtcaccggtgcagacgcgaacgatggaaaagcataaaggaaaaggccccgtcaaaatcatttgtcccggtaaagtgtatcgccgcgacaacgatgacgcgacacattcccatcagttcatgcagatcgagggtctcgtcgtggaccgcaaaatcagcatgagcgacctgaaaggcacgcttgaattggtcgccaaaaaaatgttcggccaagaccgtgaaatcaggctccgtccgagctttttcccgttcacagagccttctgtcgaggtggatgtgacctgctttaagtgcggcggacaaggctgctccgtctgcaaaaaaacaggctggatcgaaattctcggcgccggcatggttcacccgaacgtgctgaagatggccggattcaatcctgaggaataccagggttttgctttcggaatgggtgtggaacgtatcgcgatgctgaaatacggcattgaagatatccgccatttctataccaatgatgtcagattcatttcgcagtttaaacaggcgtaagaggaggatacacatgtttgtttcatataaatggttagaagattacgttgacttgcagggaatcgacccggccgtgcttgcagaaaaaattacgagagccggtattgaagttgagggtatcgagtataaaggggagggcgtaaaaggcgttgtcatcggacacgtgcttgagcgtgaacagcatccgaatgccgacaaactcaacaaatgccttgttgatatcggtgcggaggaacccgtgcagattatctgcggcgccccgaatgttgataaaggacagaaggttgccgttgcaacggtcggagccgtgcttcccggcaatttcaaaattaaaaaagccaagctgcgcggcgaagcgtctcacggcatgatctgttcccttcaggagctcggcattgaaagcaagctcgtggcgaaagaatatgcggaaggcattttcgtttttccgaatgatgctgaaacgggagctgacgcaatggcggcccttcagcttgatgatgcgattttagaattcggcttaacgccgaaccgcgccgacgcgatgaacatgcttggcgtggcttatgaagtggcggctatcctcggcgcagaggtaaagcttccggaggcttcatatgaaaaagcggcagaaaaagcggcggatgctgtttccgtcaagattgaagatacgcaggccaatccgcattatgccgcaaaaatcattaaaaacgtcaaaatcggcccgtcaccgctttggatgcagacgaagctgatgaatgcaggcatccgcccgcataataacgtcgtggacattacaaacttcgtcctccttgagtacggacagccgcttcacgctttcgattacgaccggttcggttcaaaagaggtcgtcgtcagaaaagcggcggaaaacgaaaccatcgtgacgctggatgaacaagagcgcaagctgtcaagcagccatttggtcatcacaaacggaaaaaaagcgcaagccgttgcgggagtcatgggcggagccgagtctgaagtccgtgaagacaccactgcgattttactggaagccgcttatttcgacggacagaccgtccgcaaagcgtcgagagacctcggactgagaagcgaagcgagcgccagatatgaaaaaggcattgatccggcccgcgttttgctggcggctgaacgggcctgcagtctcattcaggcatatgccggcggagaagtgctctcaggcacggttgaagaaaaccatctgaaaatcgaagcaaacaacattcacgtgtctgttgaaaaagtgaacgccgtgcttggcatggcaatcgctaaagaagaaatcatcagcatttacaagcgcctcgggtttgcagtcagtgaagctgaagacgttctcgtcgtaacagtgccgtcccgccgcggagatattagaatagaagaagacctgattgaagaagcggcgagattgtacgggtatgacaatattccgtccacgcttccggaaacggccggcacgacaggcggcttgacaccgtatcaggcaaaacgccggaaagtgagacgtttccttgaaggagcgggtctttcacaagcgaccacttattcattaacgaatgataaaaaagcggccgcttttgcgatcgaaaaatcattcaacacgatgcttgctctgccgatgagcgaagaaagaagcattctcagacacagtctcgtgccgaatcttcttgaagccgtttcatacaatctggccagacagactgattccgttgctttatatgaaacgggttctgtatttctgacgaaagaagaaaacacaaaaccggttgaaaaagaacgggttgccggagctgtaaccggattgtggcgcaaaaatttatggcagggtgagaaaaagccggttgatttcttcgtcgccaaaggaatcgttgaaggcctgctgcatcaattgaatgtgtcagatcgggttgaatttgtccagtctgcacgcaaaaacatgcatcccggccggacggcaaacattctattgaacggttcgcttgccggatttatcggccaggtgcatccggcaatggaaaaagagctggatatcaaagaaacgtatgtgttcgagcttgatctgcacgcgcttctgaccgaggaaacagaacctgtcgtgtatacgccgattccgaagtacccgtccgtcacgcgcgacattgcgcttgtggcagataaaaccgttacaagcggacagctcgaagccgtgatcaaagaagccggcggcgcgctgctgaaagaagtcaccgtatttgatgtgtacgaaggtgagcatatggaagagggcaaaaaatccgtcgccttctcgctccaatatgttaaccctgaacaaacattgacagaagaagaagtgacaaaagtacatgaaaacgtgctgaaagcgctggaagaaacgtatcaggcggtattaagaggataaagaaaaagcttgcagatcattctgcaagctttttttattatgaccgtttccgttctacaaggcgtttcgctttttgcgtattggcaaaatgaagtttggtgaacgttctgagcgcaccttctcccttattgatgatcagcttggcggcagcttcatcgacgtgcggccccgcgccttttggaatcgtcatcccagcctcacgggaaagcttatccatttcaattaagaaagaatatcgcgcaatgatagaggctgcggcgacggaaagatgtatgctttccgctttcgtgctgaaaaacgttttttcttttacgatatcccgtccggaaagatgcttaaaataaatgccgggctctgcaaattggtcaatcagaatcgcttccggtttaacgccgttcatttttctcagcagattggaaatcgcctgattatgaaggagcgccttcatttttccttggctcatgcctttttcctgcatctgattgtatttttcgtttttcaacacaagcaggctgtaaggaatggttttaattaacagtttggcgatttcaataatctgcggatcttttaaatccttcgaatccttcacaccgagttctttcattaaagaaagctttgttttgtcggcgtaagcgcaggcaaccgttatcggcccgaagtaatcgcctgttccgacttcatcagagccgatcactgacatggaggcaatgcccgccgggggagcgtaaagcggatcggccgcttttttgacggttttctttgccttcggcgcctcagccgttccccagcgggccgcttctgtgccggcgttttttccctgaaagagaaccttgcccgagcggtaggctgtaatggtacagcccgggggcttggcctggaagacggcgccctgcggaacggcgggagtaagggagccggcataggattgtttcatttgttccatagcggaagcggatacttttataacagaatgggacacgatataatctccttttttggcacttttcactgtatataccagtgtatcataacagcccgaggcttgtctttccattcaaacgataatcgtggtatgataggaactaggattctcgcggaatggaggagaaacgttgtctgacggcaaaaaaaccaaaacgacagtaaacatttacggccagcacttcaccattatcggggaagaaagcaaagcgcacatgcgccatgtggccggaatggttgatgataaaatgagagaaatcaacgagaaaaatccatatcttgatataaataagctcgctgtattgactgcggtcaatgtcgtgcatgattatatgaaactgcaagaaaaatatgaaatactggagcggcagcttaaagaaaaggaatgaacaccatatgatagatatcatcatcttagttctgctcttaatgggcacattgcttggattaaaaagaggatttatcctccaatttatatacttgacgagtttcatcctctcgattgcgtttgcggcgcttttttacaaaaacctggccccgcatctgagctttatacccgcccctgatttttccggcgggcaggcggctctgtcttttattaaaggaaacgtggagacggcttattacaacgcgatcgcgtttgtcattttgtttatcatcgcaaagatcctgctccggattatcggagcggcgcttaatatcatcgccggcattccggtcattaaacagatcaacaaactgctgggcggggtgcttggatttctggaagtctatttatttgcgtttatcctgttatacgtcgcatccgtactgccggtaagcgtgcttcaggatatgctcgcacaatcgacgcttgcaaatatcatcacacatcatacgccgtatctgtcggggctcctgcaagaactgtgggcccagtacggggcataaaaaacttctcttgaccggagaagtttttttcaagctctgcgtcagttgtgccggaagagaaaaatttgtatgatgaaaagcaggaaacgactgggggttaacagtatgcataaaaaagatatcatcaggctgcttgaaacgattgcggtctatatggaactgaaaggggacaacccgtttaaaatatcagccttccgaaaagcggcggcggcgcttgagcaggatgaccgcagcctgtcggaaatcgacgacatgatgtctttatccggaatcggaaaaggcacctacggcgtcattcgtgaatatatgcaggaaggtgtgtccggcacgcttctccaattgcagaaagaagtcccggaaggcttggttcctcttttgaagcttccgggcctcggcggcaaaaaaatcgccaagctgtaccaggagcttggcgttcatgacgcggaatcgctgaaagaagcatgcgagcagcaaaaagtacaggggctcgccggtttcggcaaaaaaacggaggagaaaatccttcaggctctcggagaagccggaaaacagccggaacggtttccgatcggctatgcgctcagcattgcttcagtcattgaagaacatttggcccggctgacggatattcagaaatattcccgggccggcagtctcagaagagcgcgggaaaccgtaaaagatctggattacattatcgctacagatcgtccggaggctgtcagagaacagcttctttccctcccgaacgtaaaagacgtgatagcgggcggggatacaaaagtatcggttatcctgacctttgaatacgagacgagtgtggatttccggcttgtgacagaggaacagtttgccaccacactgcatcattttaccggttctaaagatcacaacattaaaatgcgtcagctggcgaaagagcgcggtgaacggatcagtgaatacggagtagaaaccatagaaacgggagacgtcaaaacattcccgagcgaagaagcgttttacgcccacttcggtctgccgtttattcctcctgagctcagagaaagcgggcaggaggtcgacacgtaccgggaagaaacggaccttgtggagcataaagcgataaaaggcgatctccacatgcactcagcctggagtgacggcgctttttccatcagagaaatggcagaagcgtgtatggcaaaaggctaccagtacatggcgatcaccgaccattcccaatatttaaaggtagccaacgggttaacggccgaacggctcagaaaacaggcggaagaaattgacgcgttaaacgctgaatttgaaaattttcatatttttaaaggcgtagaaatggacattctccccgacggttcgcttgattatgatgacagcgttctgtctgaaatggatcttgtcatcgcatctattcattcaagcttcagccagccggagcatgtcattatgaaacggcttgaacaggcgctgacgaataagcacgtggacattatcgcccacccgacgggacgcctgatcggcagacgggccggctatgaagtcgacatcgacatgctgattgagctcgcagccaaaacaaatacggcgcttgaactgaatgcaaaccccgcgcgcctcgatttacggactgagcatctgatcaaagcaaatgaaaaaggtgtgactttggtcattaataccgatgcccataatatcgagatgctcgatgatatgaaaacgggcgtgaccgctgcgcgcaaaggctggacagagacaaaacatgtgttaaacgcccggccgttacatgaggtcaaagcatttctgacgcgcaatgattaagtaaggaggaccataaaaccgtgcagcaaaaagtgttatcatcacttgaatttcataaagtaaaagaacagattaccgcacatgccgcctcatcgctcggcagggagaagcttctgcagctgaaacctttgacggatctcgccgacatccaaaaacagctggatgaagtcgaagaagcatccgcggtcatgcgcttgcgaggccatgctccgttcggcggcctgaccgacataagatccgctttacggcgggcggaaatcggcagtgtgctgacgccggcggaattcaccgaattgtccgggctgctgtatgccgttaaacaaatgaagcattttatcagccaaatgacagaagacggcgtcggcataccgctgatacaggcccatgcagaagagctgattacattaggcgatttggaaagggagattaactcctgcattgatgaccatggtgaagtgcttgatcatgcgtctcccgctttaaggggaatccgcacgcagctcaggacgcttgaatcaagagtcagagaccggcttgaatcgatgctgcgttcatcttccgcttctaaaatgctgtctgacaccatcgttacgattcggaatgaccgctttgtcatcccggtcaaacaggaatacagatcaagctacggcggaattgtccacgatacatcttcatccggtgctacactgtttattgaaccgcaggcgatcgtagatatgaacaactcgcttcagcaggcgaaagtaaaagaaaaacaggaaatcgaacggattctccggatgctgacggagcatacggctgaacacacacaagaaatcgctcaaaatgtggaagtgctgcagacactggatttcattttcgccaaggcgagatacgcaaaagcaatgaaggcgacaaaaccattcatgaacggagacggctttatccgtctgaaaaaagcgcgccatccgctgctgccccaagatcaagtcgtggccaacgatattgaactgggcggagattattcaacgatcgtcatcacgggaccgaatacgggcggtaaaaccgttacgttaaaaacactcgggctgctgacgataatggcgcaggcaggattgcacataccggctgacgagggctcggaagcagccgtatttgacaatgtgtttgccgatatcggcgatgaacagtcgatcgaacaaagtctgagtacgttctcatctcacatggtcaatatcgtcaatattttaaaagacgtgtctgaaaacagtcttgtgctgtttgacgaactcggtgccggaacagatccgcaggaaggggcggcgcttgccatgagcatccttgacgaagttcaccggacaaacgccagagtgcttgcgacaacccattatccggaactgaaagcatacggatataacagacaaggcgtcatgaatgccagcgttgaatttgacattgaaacgctttcgcctacctataaacttctgatcggagtgccgggccgaagcaacgcatttgaaatctcaagacgccttgggcttccggagcatatcatcggccaggcgaagtcagaaatgaccgccgaacataacgaagtcgatctgatgatcgcatcgcttgaaaaaagcaaaaaaagagcggatgaagaactttctgaaaccgaatcactcagaaaagaagcagaaaaactgcacaaagagcttcagcagcaaatcattgagctgaatgcccaaaaagataaaatgatggaagaagccgagcggaaagctgcggaaaaactggaagccgccgcaaatgaagccgaacagattatccgcgagctcaggtccatcaagcaagaacacagatcctttaaggaacacgagctgattgacgccaaaaaacgtctcggagacgcgatgccggcttttgaaaaatcaaagcagccggaaagaaaaacagagaaaaaacgcgagctgaagccgggcgacgaagtaaaggtgctcacattcggacaaaaaggggcgctgcttgaaaaaaccggcgagaaagaatggaacgtccaaatcggcatccttaaaatgaaggtgaaggaaaaagatcttgagtttctcaaatcggctcctgaaccgaaaaaagaaaaagcaatcaccgccgtaaaagggaaggattatcacgtatcccttgaacttgacctcaggggagagcgttacgaaaacgccctcagccgcgtcgaaaaatatttagatgacgcggtgctcgccggctatccgagagtgtccatcattcacggaaaaggcacgggcgccctccgaaaaggggtgcaggatcttctgaaaaaccaccgcagcgtgaaaagctcgcggttcggggaagcgggagaaggaggatcaggcgtaacgattgtcgaactaaaataaaaagggagaaaacgtcatgaatgctttttgggaaaatgagcttgttgaaatcgcggcttattacagtgttgccgtcttgtgtctcgtcatttttctgaccgtgtttgaattggtgacatcctataaaaactgggtggaaatccaaaaaggcaatcttgcggtggcaatggcgaccggagggaaaattctcggtatcgcaaatgtctttcagcacagcatcgcccagcataattcgcttttgcaaatgatcggctggggcgtatacggatttattatgcttttaatcagctattttatctttgaatttctgacgccccggtttaaaattgataaagaaattgaaaaagataacagagctgtcggctttatttcatttgtcatctcagtcggcctgtcatttgtggtggccgccgggatttaaggggacggggaaaaatggagaagcttgcgaaagtgctgctgtcggcagcggggatttttctgttcatcggacttatttatctggtcatgacatcttaatactgaaaaaaggctgccgaactcaaatcggcggccttttttattgagaataccagtttatgcaggccgtatcagagcaaatgacggcttcccaattcatggcgcggacgacagactgaatgtcttgttcttccatgagaaagagtgtcgtaaaagaatcatatatgctcataaaagcggcgcgccgttttttcatcggcaatgatcatgtcagcccgcagcagtccgcatacatccgaagccgccgtttgattgagtgaaaataggcctttctcttcgacaggctcataataagtgcagcgctttatgccttttgaacggaacacatccaaaagtcccggaatcaaaaatggcgaagtgacatcatcgctcggcaagtacagatcgggatgatggagccgatttaaccgctcggcggattcaggatgtgcatattcctcccgcaatgccgtgacagcagtcataagcgcaagcgccgtttctttttcagaacgcaggccgcaaatgctcatgacggtttgccaggaaacgggtctgcccatcgcgatgatctcctcatcactcggatacatatgttcataaggccgtttgcgcttttgctcttcccgaccatctggcatccggacaaagggatggagcaaaaaggcggccgacgtaatcggcttcggcagctggcgcaggataggaactcccccttcaaaatgcagcgtttccagaaaactcaacacctcctgaaactcgaaatttcccatgaaacgctttcccattccaatcacccttctgctataataatagcgtataggaaaacagaagggagaggtattatgcagtctgaaaagccatggctttctcaatatcccgaagagattccgcatgagcttgaatttaccgatcaaaccctgccatccaatctgacaaactccgcagctcaattcccgaaccataccgccatttattttctaggaaaaaaactcacattccaagacgttctcacagattcattaaagcttgccgcttttttacgcaaaacaggcctgaaaaaaggtgacagagccgccattatgctgcccaattgtccgcagtcggtcatcgctttttacggcgtattgtttgccggcggcattgtcgttcagaccaatcctctctacacggaacacgagcttgagtatcagctgaaagacagtgcgccgcgcgtgatcatcaccctcgatatgctgtttccgaaagtgataaaaatgaaaacgttatcactcgtcgaacgcattattacaacaagtataaaagactttttgccgtttccgaaaaatatgctttatacgctcacgcaaaagcaacaggtgcatattgattatgacggctgcgaacaaattcacaaattagcggatattttaaaaaacgaaaaagcagaggaagcagagccatttgatattgaccctgcgcatgacatcgccgtgcttcaatacacgggcggaacaaccggctatccgaaaggcgtcatgctcacacaccgaaacattcaggccaatacagaaatgtgcgccgcctggatgtacaaaatgaaaaagggagccgaaaaggtgctcggcatcgtgcctttttttcatgtgtacggattgaccgccgtgctcaatttttccattatgcagggatgtgaaatgatccttcttcctaaattcaatcctttggatacactgaaaacaatcgacaggttgaagccgacggttttccccggggcgccgacgatttacatcgggctgctgcatcacccggagctgaataagtatgatctgtcctccattgaaagctgtccgagcggttcagcggcactgccggttgaggtcaaacagaaatttgaaaaagtgaccggaggaaagcttgtggaaggctacggattatccgaagcatcaccggttacccattcaaacttcatctggggaaaaaataaacccggcagcatcggctgtccctggcccaataccgatgcgggaatctattcagaagaaaaaggcgggcttgcggagccgtatgaacacggcgagctgatcgtaaaaggccctcaggtcatgaaaggctattggaataagcaggaggagacggcgcgtgtcatcagagacggctggctgtttaccggagatatgggatatatggatgaggaaggatttttctacatcgccgacaggaaaaaagacatcatcattgccggcggatacaacatttacccccgcgaggtggaggaggcgctttatgagcatgaagccgttcaggaaatcgtggtagcgggcgtccctgattcctacagaggggaaacggtgaaagcatttatcgttttgaaaaaaggcgccgaggcagatgccgatgagcttgatgcgtttgcaagagagcggcttgcgccgtacaaagtcccgaagctgtacgaattcagaaaagagcttccgaaaacggccgtcggaaaaatattaagaaggcgtttagtcgaagaggaagatgcttcccatgaaaacaaggtgccttaaaagaaaaacttgacaaaatccggattcctttttatcatgaagttatgaatgaatagtcattcatttatcgaaggaaggaacgatgacattgaaccaaaaacggccaaagtatatgcagattattgatgcagcagtagaagtcatagcggaaaacggctatcaccaatcacaggtgtccaaaatcgccaagcaggccggcgttgcggacggcaccatctatttatatttcaaaaacaaagaggatatactcatttctctttttaaagaaaagatgggccagttcattgaacgcatggaagaagaagtgaaagaaaaaacgacggcaaaagaaaaactcgctctcgttattaagcagcatttcacactgctcggcaatgaccgccacctcgcgattgtgacccagcttgagctcagacagtcgaatatcaagctgcgtctgaaaatcaatgatattttaaaaggttatttaaacatgctggacaccattttgaccgaaggaatcgagtcgggcgaatggaaagataatctcgacgtccgcctcgcccggcagatgatattcgggacgatagatgaaacagtgacaacatgggtgatgaacgatcagaaatatgatcttccggatttgtcagacaaggtattggagctgttggtgtcagggattcatcaaaactaaagggggttgacggatgaacagcctttcgatggcggtagaacaatctgttgcggtgatcaccattaatcatcagccggcaaacgcgctgtccggcgcggttttagatgagttgtccggtctgttcgaccgctgtgaaacagatgacagtgtcagaagcatcatcattcgcggagaggggaaatttttctcggcgggcgctgatataaaggaatttacgtcgcttgaaaatcttgagcaatcttctgccatggcggataaaggccagcagctgatggaaagaattgaagggtttccgaagcccgttatcgcagcgattcacggcgctgcgctcggcggcggccttgagcttgccatggcctgccatatcagaatcgctacattagatgcaaagctcggcctgcccgagctgaatctcggcattattccgggctttgccgggacgcagcggcttccccggtacgtcggtacggcgaaagcgcttgaaatgatcggcacttcagaacctgtaaccggagaagaagcgctcagcctcggtcttgtcacgataggcgccgaacatgaggaagagctgctgcaaaaagcgaaaacgctcgcgggcaagtttgcggaaaaaagcccgcagtcgatggcttttctgcttgagctcctttattcaaacaaggtctattcttatgacggcggcttaaagcttgaagcaaagcgctttggggaagcatttgcatcagatgacgcaaaagaaggcattcaggcatttctcgaaaaaagaaagcctcaattcggtgggcgaagataaaggggataagaatatgaatctatttgtactgatgaaacggacgtttgacacagaagagaaaatcgtcattgaagcaggaaagattcaggaggacggggccgaatttatcattaatccgtatgatgaatacgccattgaagaagccattcagctgaaggaagagcacggcggaaccgtgaccgccgtaaccgtcggcggagaagatgcggagaaagaactgagaaccgcccttgcgatgggctgtgaccaggcggtgttaatcaatattgaagatgatctgagcgatcctgaccaatactccgtttcaactatcttatatcattatttcaaggaccgggaatatgatctgattctcggcggaaatgtcgcgattgacggcggttccggccaagtggctccaaggcttgccgaactgctgaacattccttgcgtcacaacgattacaaaactgacaatcagcggcgatgaagctgcggcagagaaagacaacgaaggggataccgaaatcattaaaacctcacttcctttagtcatcacggcacagcaaggcttaaacgagccgcgctatccgtcgcttccgggcattatgaaggcgaagaaaaaaccgctggaagaacttgagctcgatgatctcggcattgatgaagatgatgccgcaccgaagctcaaaacgatcgaacgttttctgccgccgcaaaaagaagcgggcagactgatcgaaggagaagcctctgagcaggcgaaggagcttgtatcactgctgagaaaagaagccaaagtcgtataaactgatattaaagaaactgggggatgtcagaatgggaaaaaaagtgatcgtactcggagaaattcgtgacggcgccttacggaacgtcacctttgaagccatagccgcaggcaaaaccatttccggcggaggagatgtcatcggcgtgctgatgggaaagggcgcggctgatgcagcatcagaactcattcagtacggcgccgacaaagtatttacggccgattcgccggggctttctcagtatacggcggacggatatgccgcaattctcggggatttgatcgaaaatgaaaagcctgatgcggtcattttcggccacacttctatgggaaaagatttgtcacctaagcttgcggcccggtttgaaacggggctgatttcagacagcacagatgtaagcgttaccggagataacatcgtttttacaagaccgatctattccggcaaagcctttgaacaggtgatttcaaccgatcctttcattctggcgacaattcgtccgaataatattcaggcattagaaaaagacgcgaaccggacgggtgatattgaagagcttgcggcgcctccggcagatttgcggacggtcattgaagaagtagtcaaaaaaacggcggacggcgtggatttatcagaagcgaaaattatcgtagcaggcggccgcggtgtaaaaagcaaagatggatttgaaccgttaaaagaacttgccgaggtgctcggagcagcggtgggcgcttcgcgcggcgcatgtgacgcggactactgcgactattctcttcaaatcggccagacgggaaaagtcgtcacgccggatttgtatatcgcctgcggaatttccggagcgattcagcatttggcgggcatgtcaaacagtaaggtcatcgttgccattaacaaagacccggaagcggaaatatttaaaatagcggactacggaattgtcggcgatttgttcgaagtggttccgcttctgactcaggaatttaaaaatgccaatattcattcataatcaaaaccctctggcttatttgtcagagggttttggtttgtgttaattagttcgtacaaattatagattaataaaacaacagattgacatgtacgaaccaatgtaataagcttttgtaaagcgcttacaaacttatccatacagcatacatcccagatagatcggctgtagtgctttcattcttattaaggggaaggaatgatcaagtttgtctcacaatacggcagtcattcaaactgatatcacacggggaaccattaataaaaacatatacggacatttcgcggaacacctgggaagaggcatatatgagggcatctgggtcggaaaagattccgatattccgaataccggaggggtcaggacggatgtcgccgccgccctcaagcagcttcagattcccgtcctcagatggccgggcggctgttttgctgatgaataccattgggcaaacggcgtagggaaacgcaaaacaatgctgaatacccattggggcgggacgattgattctaatgaattcggcacgcacgagtttatgatgctttgtgaactgctcggatgcgaaccgtacatcgccggtaacgtcggcagcggaacggttaaagaaatggctgattggattgaatacatgacgtttgaagcgggcacgccgatgtccgactggagaaaagaaaacgggcgggaaaaaccgtggaagctgaaatatttcggaataggaaatgagaactggggctgcggcggaaacatgcatcctgagtattatgctggcctttacagaaacttccaaacctatgtccgtaattacagcggtaatgaaatctataaaattgccggcggcgcgaatgtcgacgattaccgctggactgaaactttaatgaaaaaagccgcggatctcatagacggactgagcctgcattattacacaataccgggcgacttctggaaggggaaaggatcagcgacggagtttacggaagatgaatggttcatcacgatgaaaaaagcggcgcatatggatgaattgatcacaaggcacagcgccatcatggatcagtacgatcccgaaaaaagagtcgggctgatcattgatgaatggggcacgtggcttgatcctgagccgggcacaaatccgggctttctgtatcagcagaatacgatccgcgacgcccttgtcgccgccgcgcattttcacatttttcatcagcacgcagaccgcgtacagatggccaatatcgcgcaaaccgtcaacgtgcttcaggcaatgatcctgacagaagggaaagaaatgctgttgacgccgacgtatcatgtgttcgatatgtttaaggtgcaccaggacgcatctcttttggcggcagaaacaaatgcagccgggtacgaatggaatgacggccggctcccgcaagtcagcatttcagcgtccaaacagcagaacggagacatacatatcagcatttgcaatatcgatcatctgcacaaagctgacgtgaagattgaactgcggggcatgaaaaagacagggacgccttcgggaacgattctgcacgcggaaaaaatgaatgcccacaatacattcagcagtccggaaaacgtcaaaccgaagccgttttccgggtttgctcaaaagggaggaaaacttgaggcggagcttcctccgatggcgattgtattaatcacgctgcctgcaggtccatcttaagttttgaacgcccgccgcccggttataatacactgtataaataagattatttccggcgggttcgggggaaaataatataagcattaaattagcatgaacgaatgggagatgctatactaaaaatcatcatttgacaattggaggaataacaaatggctatcgtaaaagcaactgatcaatcgttctcagctgaaacaagtgaaggtgtcgtattggctgatttctgggctccttggtgcggaccttgtaaaatgatcgcgcccgttcttgaagagcttgatcaagaaatgggagacaaactgaaaatcgtcaaaatcgacgtggatgaaaaccaagaaactgccggtaaatacggcgtcatgagcatcccgacacttctcgtgctaaaagacggagaagtcgttgaaacatctgtcggcttcaaaccgaaagaagctcttgaagagcttgtaaacaaacatctgtaagccgaaagcttccgttacggcagggcgattcctttgaaaggggtcgcctttttttgatcttccaaaagctgagaatggagaaaaacaaatgttcgtgatacactgaatggacacgagaaatgaatgtaaggaagggtaacgtatggataaacaactgaaagaaaagctggccctccttcccgatcagccgggctgttatttaatgaaagaccgtcagaaaacagtcatctacgtggggaaagcgaaagtcttgaaaaacagggtgcggtcttatttcaccggttctcacgacgcgaaaacccaacggctggtgacggagattgaggactttgaatatatcgtgacttcctccaatcttgaagcgcttattttggaaatgaatctgattaaaaaatacgatccgaaatacaatgtcatgctgaaagatgataaaacctatccctttattaaaatcacccatgaacgtcatcctcggctgattgtcacccggaatgtcaaaaaagacaagggacgctatttcggcccgtatccgaatgtgcaggcggcgcgggaaacgaaaaaactgctggaccgcctttacccgctcaggaaatgctcaaagcttccggaccgcgtctgtctttattatcatctcggccaatgcctcgccccatgtgtaaaggatatatctgaggagacaaaccgcgagattgttgaagacatcacccgttttttaaagggagggcataacgaaatcaaaaaagagcttgaagcgaaaatggcagaagcggccgaaaagcttgaatttgaacgggctaaagaattccgcgaccagcttgctcacatcgaatcgacgatggagaagcagaaaatgaccatgaatgaccttctggaccgcgatgtgtttgcatatgcctacgataaaggctggatgtgcgttcaagtcttttttatacgccaaggaaaactgatcgaacgcgatgtcagcatgtttccgatgtatcaggaagcggatgaagagtttctgaccttcatcggccagttctattccaaaaacaatcactttctgcctaaggaaattctggtgcctgacagcgttgacagggacatgattggcgagctgttggaaaccgccgtgcatcagccgaaaaaaggtccgaaaaaagagctgcttttgcttgcgcacaaaaatgcgaaaatcgccctgcgggaaaaattctcgttaatcgagcgggatgaggaacggtcaatcggtgcagccgaacggctcggcgaagcactgaatatttacacgccgcatcggattgaagcgtttgacaactccaatattcaaggcacaaaccccgtatcggccatgattgtctttattgacggaaaaccgaataaaaaggaatatcgcaaatataaaattaaaaccgtaacagggccggacgattacggctcaatgagggaagtcgtcagaagaagatacacgagggtgctccgcgaaaatcttccgctgccggatttaatcatcattgacggcggaaaagggcagattaacgcggcgcgcgacgtgctcgagaatgagctcggccttgatgtcccggtagcgggactggcgaaagatgataaacaccggacatcgaaccttttgatcggcgacccgcttgaaccggtgtttctggagcggaacagccaagagttttacctgcttcagcgcattcaggacgaagttcaccgttttgcgatcagctttcacagacagatccggggaaaaagcgtctttcaatccgttctggatgatatccccggaatcggcgaaaaacgcaaaaaaatgctcttaaaacatttcggatctgtcaaaaagatgaaggaagcaagccttgacgatatcaaaaaagccggtgtgccggccgcggcggcccagttgctgtttgaaaaattaaaaaaatagtattgtgcttttctgaaaaatctgctagaatgtgaactaatttcataagatcgtgttatatggtgaagatagaggtgcgaacttcaatagtaagcctttggagaatgatggattctgcgaaaaaggctgaaaggggagcgtcgccgaagtgtgtcacatcccatcggtgtgatttgctggccttgcattaaataaatgtaaggctgtcaagaattcattttcttggagggctatctcgttgttcataatcaatcgtactgatatgaaaagcaatgagagctattcctctcattgctttttttattgtggacaaaacgctcttttctcctcacccgcacgaaccaaaatgtaaagggtggtctagtatgggtcttatcgtacaaaaattcggaggcacttccgtcggctctgccgaaaaaattcaaaatgccgcaaatcgcgccattgctgaaaagcaaaaaggccatgatgtcgtagtcgtcgtttcggcaatgggaaaatcaaccgacgcgctcgttaacctcgcggctgaaatcacatctgaaccaagcagacgcgagatggatatgcttttgtctacgggggagcaggtcacgatttcgcttttggccatggcgcttcaggaaaaaggatatgacgccgtctcttatacgggctggcaggcgggtgtccgcacggaagccgttcacggcaatgcgagaattacggatattgatatcacggcgattcgttcgcagcttgcagaaggcaaaattacagtcgttgccggttttcagggcgtaacggaagacggcggcatcacgacgctcggacggggcggttctgataccacggcggtcgctcttgcagcagcgctggaagcggataaatgcgacatttatacagatgttccgggcgtatttacgacagatccgcggtatgtccggtcagcgagaaaactggcggggatttcttatgatgaaatgctggaacttgcaaatctcggagcgggtgttcttcacccgcgggcggttgagttcgcgaaaaactaccaagtgcctttagaagtgcggtcaagcacggaacatgaagccggaacattaattgaggaggaatcatcaatggagcagaatttaatcgtcagaggaattgcatttgaagaccagatcacaagggtgtccgtcacgggccttgcaagcggactgacaacactttcaacaatcttcaccgcgctggcaaaacgaaacatcaacgttgacatcattattcagacacagtcggatgatggggaagcggatatttctttctcagtgaaaacggaagatgccgcccaaacggtcgccgtgcttgaagaatataaaaacgcgcttaactatgaaaaaattgaaaccgaaagaaaactggcgaaagtctccattgtcgggtcgggcatggtttcaaatcccggcgtcgccgcggacatgtttgccgtactggcggaaaaaaatgtacaagtcaaaatggtaagcacatccgaaataaaagtatcagcggttgtcagcgaaaatgatatggtgaaagcggtcgaagcgcttcatgatgcgtttgagctgtctaaacagccgtctgccgtataaacgggcaggcaaaaaggcgggacttttgagtcaccgcctttttcaattatacagggtccttcatatcccattttacagtcaggacgactttatccgctctcttttttacctgttcataagattctgcaatctgatcgttcatcaattgaatctgttcggctataaaaccggcttcaagctggaaacaaggctctttctgatgtttgagcctgctggatacgagcggtccttccagttcaaattccagttcttgttttttcgatcctgcgtttgtcaaagttccccagccggctttttcaaaaaaggcggggatttcttcccacgattgaagaggaaatttgcgggcgaggcgttttcccgcccaatacatcatcgatgaatgatccggaccgaggatatccggaagcacgatttcccggattaattcgtagccgtatgcgctgacgtcgagttcagttaaaggttctaaagctgcttcataattattcttcatattatgtattcccctctctccttcgtttattatagcttaaacaggggggaggattacaggatgatcctataaaacacgcgaaaaaatgtgagaaagatatcgcaggaaaataaaattttccctccagataatcaattccgaaaattataatttatgtacacgttttcttgacgcccttttgagggaggagtaaaatgaaattgtcaataaattttaataaagtgcttacaattgaaacgaagtgggggcagagattttagtacatttcgcacttaaatcaaacagggggtaaagtaatgtctgggaacagagagttttattttcgaagattgcattccttgctcggtgttattccggtcggcatctttttgatccagcatttagtcgtcaaccaatttgccgcaaggggagcggatgcgtttaacaaggcggccggctttatggacagtctgccgttcaggtatgcgttagaaatttttattattttcttacctttaatttatcatgcggtttacggtgtgtacatagcatttactgcgaaaaacaacgctggccactacagttatttcagaaactggatgtttgtgcttcagcgtgtcactggtattctcacccttattttcgtcagctggcatgtgtggcagacgcggattgccgcgcagatgggcgctgaagtcaacttcgatatgatggcgaatattctgagctcgccgtttatgctcggtttttacattgtaggcgttttatcggtcattttccacttttcaaacggcttatggtcttttgcggtcacatgggggatcacggttacgccgcgttctcaaagaatttcgacttacgtgacgctgattatatttttagcgctttcatacgtaggtttaaaagcgatttttgcgtttgtgtaagagaactagattactagagggagaggggctatcatgagtcaatcaagcattatcgtagtcggcgggggtctagccggcctcatggcgacaattaaagcagcggaatcaggcacggccgttaaattgttttccatcgttccggtcaaacgctctcactcggtctgcgcgcagggcgggataaacggagctgtcaacacaaaaggggaaggagactctccgtttgagcattttgatgacacggtatacggaggcgactttttggcaaaccagcctcctgtaaaagcgatgtgtgaagcggcgccgtccattatccacttattggaccgcatgggggttatgtttaacagaacgccggaagggctcttggacttccgccgtttcgggggtacacagcatcacagaaccgcttacgcgggagcgacgacgggtcagcagcttctttacgcactggacgagcaggtgcgcagatatgaagtggcgggtctcgtcacaaaatacgaaggctgggaattcctcggcgccgttcttgacgatgagcgcacgtgccgcggtatcgtagcccaaaatctgaccaatatgcaaatcgagtcattccgttctgacgccgttattatggcgacgggaggacccggaatcgtattcggaaaatcaacaaacagcatgatcaatacgggatctgccgcatcaatcgtctatcagcagggcgcttattatgcaaacggcgaatttatccaaattcacccgacagcaatcccgggggacgataaactgcgtctgatgagtgaatcggcgcgcggcgagggcggtagagtctggacgtacaaagacggaaaaccttggtacttcctcgaggaaaaatatccggcttacggaaacctcgtgccgcgggatattgcgacacgtgaaatctttgacgtgtgcgtgaatcagaaactcggcatcaacggagaaaacatggtgtatctcgatctgtcgcacaaagatccgaaagagcttgacgttaagcttggcggcattatcgaaatctatgaaaaattcatgggcgatgacccgcgcaagcttccgatgaaaattttccctgccgttcactattcgatgggcggactgtgggttgattatgatcagatgacaagcatccgcggactgttcgcagcgggtgaatgtgattattcaatgcacggaggaaaccgtttaggggcgaactctctgctttccgccatctacggaggaatggtggccggaccgaatgcggtgaaatatgtttccggacttgaaacatcagcggaagacctgtcttcttcattatttgattcctatgtgaaaaaagaagaagaaaaatgggccgatatcatgaagatggacggcgatgaaaatgcctacgtgcttcaccgtgagctcggagaatggatgacggccaacgtcacggtggtccgccacaacgacaagcttttgaaaacggatgacaaaatccaagagctgatggaacgctttaagaaaatcaatatcaacgatacgacaaaatggagcaaccaaggggcgatgttcacccgccagttctccaatatgcttcagcttgccagagtcatcacgctcggcgcatataaccgaaatgaaagccggggagcgcactataaaccggatttccctgaaagaaatgacgatgagtggctcaaaacgacgatggctaaacatgccggtccgtttgaagctccggaatttgaatatcaggatgtcgatgtatcactgattgcgccccgtaaacgcgactactcgaagaagaaggtggcgaaataatcatgagtgagaaaaagatacggtttatcattacacgccaggatacgcccgaaagcgcgccatacgatgaagaattcgaaatcaattaccgcccgaatctgaacgtgatttccgccctgatggaaatccgcagaaatcccgtgaatgcaaaaggagagaaaaccactccggtcgcatgggacatgaactgtcttgaagaagtatgcggcgcctgctccatggtcatcaacggaagaccgcgccagtcgtgtacggcgctgattgataagctggaacagccgatccgtctgaagccgatgaaaacattcccggttgtccgtgaccttcaggttgaccgcagcagaatgtttgattcactgaaaaaagtgaaagcatgggtgccgattgacggaacttacgatttggggccggggccgagaatgccggaaaaacgccgccagtgggcatatgaattgtctaaatgcatgacatgcggcgtctgccttgaagcctgcccgaacgtcaacagcaagtcgaaattcatggggcctgccccgatgtcacaagtgcgtctgtttaatgcccatccgacgggcgcgatgaacaaagcagaacgtttagaagctttaatgacagacggcggcctcggagattgcgggaattcacaaaactgtgttcaatcctgcccgaaaggcattccgcttacgacttcaatcgctgctttgaacagagataccaatttacaagcattccgtaatttcttcggaagcgacagagtataagaaagagaaaaagagcctcttccgcacgggagaggtttttttataaggagctgaaggtgatgaaacaaccgcaatatattgatatcccgtttgaagaatggagacagtcgttttctttctttactgaagtatcggttcgtttttcagaaacggatatgttcggccatatgaataatgtaacccctttcatctattttgaagaagcacggatcgcttattttaaacagcggggcatgacggcgcaaaactcggaaacgatgacggtcgtcgcaagccagcagtgcgactatatgcgtcaggtgatgccgtatgaaaatctgcggatttatgtgaaagcaagcgctgccggaaatgcgtccgtcacccttcattaccttggagaaaatgagtcgggcctgccgtgctttacaggttccgtcgttatggttcaagtgtcgaaaaaaagcggcaaagcggtcagctggacggagcgggagaaaggcattctgctcgcctgaacggataactatttctctaagagacgtcacctccgaagcgccctttacatatgatatcttgactatataaacccattcgtttcagattcgctctcaccttagcaaggagggttacaatacttgaaggagaaagattttcaatcaaagccgctgctgaccaaaagagaaagagaagtattcgaattgctcgttcaagacaagacaacaaaggaaattgcaagcgagctatttatcagtgaaaaaactgtacggaatcacatttcaaatgccatgcagaagttaggtgtgaaagggcgttcgcaagctgttgtcgagcttcttagaatgggtgagctagagctctgattcttgccggttttccttctttacgagaaggagccggttatttgcgttggcgcccgggctgatgggcatgcggtgaaaatcccggtttttcctttttctccgtcagtcttgcattttcttaaaaaaagaaggaaaatagacacggagcgcatagcccagaaagatccttgagtgagggatggacaaatgacatcaaaatctgtagagcatgttgcggatatcgaaaaatcactccgccatatcgctgcgatcattaaacaaaaaggaagagaaatccttaaccaatatgcaattacaccgccgcaattcgtggggcttcaatggctttatgaattgggggatatgacaataggcgaattatcaggcaaaatgtatttggcttgcagcacgacgacggatctgatagaccgcatggaaaaaaataagcttgtcgagcgggtcaaagacccggctgacagacgggtcgtcagaattcatcttctcgctgaaggagagcgcattatccaagaagtgattttgaaaagacaggcttatttgcgggatatgtttgcgacattttccgaagaagaaacagccgctttcgaaaaatcattattgaaactgcagcatgaaatgaaaagaaaatgaggcgattttgttggaacagccgataggagtcattgattccggggttggcgggttaaccgttgctaaggaaatcatgagacagctaccgaaggaaaatatcatctatgtgggagatacaaaacgctgcccgtacggcccgcgtcctgaagaagaagttcttcaatacacgtgggaaatgaccgattacctgctggaaaaccaccatatcaaaatgctcgtgatcgcctgtaatacggccacggccattgccttggaggatattcagcgcaaaacggatattccggttgtcggcgtcattcagccgggtgcgagaacggcgataaaggtcacgaaaaaccagcatatcggcgtcatcggcacggtcaataccattaaaagcagagcgtatgagcaggcgctgctcgggttaaacgcagaacttcaagttgagaacacggcttgtccgctgctcgtgccgtttgtggaaagcggacggtttcttcaggaatcagcggaggaagcggttgaagcatcgcttgaacctttaaaaggtacatcaattgacaccttgattttaggatgtacgcattatccgatcttaaaagacccgattcagaattatatgggagagcatgtgaaaatcatttcctccggagacgagacggcgagagaagtgagcaccatcttgtcttataaaggtttgttaaaccaatcgaaacatgcaccggagcatcaatttcttacaacgggagagcggaacggcttcgcaaaaattgccgaagactggttcggccacgaaatcggccatgtcgagtgcatctcccttcaagagccggtcagaaaataaatcaaaaaaaccccgctgtttacagcgggtttttttgcgcttcccggtctatttcccggacagggctcgtatacatcatagtacaaacagccttaggagggaaaagtatgctgaaaaaaggacctgcagtcattgctgcaacatgtcttacttcggcttttgtgttatctggatgcggtttgtttcaatccgataaaacagccggggaaattgacccgcctcaagacatttcatatgtaaaggatgaagcgggaattcaggcaaaaccaaagcagtcagagaaaaacggcacttctaaagccgaccagccggccaatacagtcatgcgagaactgtatctgattgataaaaacggctatgtcgcagcacagacactgcctcttccgaacagtgagggaaccgcaaagcaggcccttgagtacttggttcagggagggcctgtatcagaaatcctgccgaacggcttcagagcggtgctccctgcggatacgacggtaaatgtcgatattaaaaaagacggcactgcagtcgctgatttttcgaaggaatttaaaaactataaaaaagaagacgaacaaaaaatcctgcaatcgattacgtggacgcttacccaattcagctcaatagataaagtcaaaatcagaatcaacgggcacgaactgaaagaaatgcctgtgggcggcacgccgattacgggcgacttaagcagaaaagacgggattaatattgaaacggccggagtgaatgatctgacagacacccatccgctgactgtatattatctggcggaaacagagacaagcgaatactacgtgcctgttacaaagcggattgacaattcggaaacaaatgacatcaccgctgccgttgaacagctcaccgacggaccgggcaaagcaagcgggcttttgacggactttaataacgatgttaagcttctcagcaagccgaaagtgaaagacggccaggttacactggactttaacagctctatttacggaagcgccgacgaaaaaacaaaaatggtgtcatcgggcgtactggacagcatcgttctcacgttaaccgaacagccgtcgattaaaagtgtttctataaaagtaaacggaaaatcagaactggtgaatgaaaaaggagaatccctttcaaaacctgtttcgaggccggcacaagtgaatacgggtagtttttaatttgcgatttttgatatactagtaaaaaagaggttagcgttccggctgcctctttctttattcacaatccggaacaaaaggtttatgtacatataatcggaggtaaaatatgagacacgacggaagacagcacgatgagctgcgccctatcacatttgatttggattttatcactcacccggaaggctctgttttaattacagcgggaaatacaaaggtcatctgtaatgcatctgtggaagaccgggtgccgccatttttacgcggcggaggaaaaggctggatcacagcggaatacagcatgcttccccgcgcgacgaatcaaagaacgataagagaatcttcaaaaggaaaggtctccggcagaacgatggaaattcagcggctgatcgggcgcgcgctccgggccgtcgttgatttggagaagctcggcgaacggacgatctggatcgactgtgacgtcattcaagctgacggcggaacaagaacggcttccattaccggcgcattcttggcaatggccattgcgaccggcaaactcgtaaaaagcggcgttatcaaaacctctcccgtgacagattatctcgcggccatttctgttgggatggataaagaagaaggccttcttttggatctgaattatgaagaggattcggcggctgaagtcgacatgaatatcatcatgacgggaagcggacgttttgtagagcttcaagggacgggcgaagaagccacattctcccgtgaagatttaaacggactgttaagccttgccgaaaaaggaatccagacgcttattcaaaagcaaaaagaagtgctgggagaaacattgcctgaactgaaataagaaagagaggcctgatcagcgtgaaagaagtcattattgcgacacacaatcagggaaaagtgaaagaattcaaggaaatactcgaaccgaaaggctacagcgtctcttctttggcggaaatcggatttacggaagaaattgaggaaaccggacatacctttgaagaaaacgccatcttaaaagcggaagccgtggcaaaagccgtcaacaaaatggtcattgcagacgactccggtttatcagtggacaaccttggaggcagaccgggcgtttattcagcccgttatgccggagaagcaaaagatgataaggcgaatatggacaaggtgctgtcagaattaaaaggcatcgaaaaagagcagcgcacggcccgtttccgctgcgcccttgccgtcagcatgccggggcaggaaacaaaaacggtcgaaggtcatgttgaagggtatattgcagaaggacccgaaggagataacgggttcggctatgatcccatttttattgtaaaagataaagataaaaccatggcccagctgacaagcgctgagaaaaacaaaatcagccacagggctgaggcgctcaagaaactgtcaaagctgcttgattcataagggggagcgtatgcaatgaaagtgctgataataagtgacagtcacggccttgaagacgagctggagacgattgcaaagcggcacgaagacgaagcggatctgatgattcattgcggtgattcagagcttgacgccgcacatccggcactcacgccgtatcacaaggtgaaaggcaattgcgactttggcggcgggtttcaggatgaactccttctggatgccggttcaaagaaaattctggccgttcacgggcatcttcacggcattaaacagtcacttttaactgttttttaccgggcggaagagcttggggcggatatcgtctgcttcggccattcacatattgcggggagtgaagtgcttcggggcaagcttttgattaatccgggcagcatccgtcttccgagagtccgcaatgtgaaaagctatgccattcttactcttacagaaagagaaggcgccgtgacattttacgacgaaacgggtcgggaattgaaggacttggggaatacaatcagtttttaacaagtgatgggggagatttcattcttccccatcaaaagttttttaaaaaatattgacttatgatttgaacctgtatataataaatcttgtcgctgatacataaagcaaaagctgtcccagtagctcagctggatagagcaacggccttctaagccgtcggtcgggagttcgaatctctcctgggacgtacaaaaaaagagctggtgacatcagagtgaaaactgatgccgctggccttttttatcggatgactatattgtcaattcactgatatcatggtaaaataatcagcagatatttgtttttcatgtcccagtagctcagccggatagagcaacggccttctaagccgtcggtcgggagttcgaatctctcctgggacgtataaaaaacctcaagccctgacaatgggtttgaggtttttttgtattttatttttagttttacgaaacaaaagttccgtatttgatgaaaattgtaaagtaattttaatgtaaatgaaacttaatgtaatatttaccgtaataaatatatgtataaagatacttaaggcgcccttgagtgataaattatctgatttctatcatacgttttgttgatgattgatagaaagacagcaggaggaattagcttttgaagtacgcatttgcatataaaaatcacaatatagaaacgatcttttgcggaaaagacgagctgtttgaggaactgaaacaatttttaatcactcaatgcggtttaatcattgttgaggtttcaagggctgattactatacggagcaggaaatgaatcagtggaatgaacgttatactctgtgaataagaaaagaaaccggccgtgtgagaccggtttttgtatcatctgaatccgctcggagcgctgaagcccccggcatggccgctgaaaccgccaccgagcgcgccgggatgtgccccggcgccgaggcttccgccgacgtcactgaaggtttggccgtagtacccggatgtataagggtacggaacgaattgctgtccggcgaatgacagtgtgctttgcggggtctgctgtccgtatccggatggcggaaatccctgctgaaaagaagggccgccttgatatggtgctgtatgcatcggggccggaggatagtaagactgcggcggtaagaccggtaaaggcggaaatccaggaggcaggccctgcatgcctgataacatcttattcatgacatcactcatttcttacgagataagaacagtgtatgcgtatgtctgtataaagagcctgttcaatcgaacggaatatctgacaagcatgccggaaggacagagaaaaatcgcgtaataaaatgtgacatattcgtatatgaacggaaaaatttcatgtaatcttgagagattaataaaaaaaatataaaaacttttaacatttgccgatccttttatatcagtaatgaaagcgtatacaaaatagattgattaatctaaattgtctaataattataaaaatgctgttgacactgtctgcaaacgggcgtaatatgagttcaaacaaaaataaataaatgattcacactaaaaagaaaaatcataaaacactgaaaaaacaaacaaatgaaggttcttttttaataaaagagctgccataataaaaagcgcagaagaggataagtagctttgctgaagtttttcacagagagccggtaacgctgagagccggtaaaacaaatcaaagtgaactcccctcagagtgccggtctgaaatgtaaagagtaggactcggccgagtgaacgcaatgtttactcgttatcaaaacggataatcattatccatgagacggtctgcatatgaccgtaaacaagggtggtaccgcggagagcaaagccttttcgccccttttggctatcgcatgaaatgcttggctgaatgtgggtgggaaggcttttttatttgcgtcagccggcgctgcgttttatgaattggattttagaagggaacattgaaaaggaggaactgaaaatgggcacaaatgtacaggcggattctttgtctgccgattgtacaaaaacaatgaacggggctctgatgctgattgaatcattaaagaaagaaaatgtcgagatgatcttcggctatccggggggagccgtccttccgatttacgataaactgtatcaatcaggattggttcacatcctgccccgccacgagcaaggcgcgattcatgcggcagaagggtatgcgagagtctccggaaagccgggggttgtgattgctacctccggacccggagcgacaaatttagttaccggtcttgcggatgcgatgattgattcactgccgctcgtagtgtttaccggtcaggtcgccacttcggtcatcggcagcgacgctttccaggaagccgacattttaggaattacgatgccgattacgaaacacagctaccaagtccgccgtccggaagatctcccccgtgtgattaaagaggcgttccatattgccacgacgggaagaccgggcccggtattaattgatataccgaaggatgtcgcagcatttgaaggagaattcagatatgatcacgagatcaatcttccgggttatcagccggtaaaagagcctaactatctgcagatccgaaagctcgtggaagctgtcagcagtgcgaaaaagccggttattttagccggagcgggtgttttgcacggtaaagcttcagaagatttaaaaaattatgccgaacagcagcaaattccggtagcgcacacgcttctcggtctgggcggtttcccggcagaccatcctctttttctgggaatggcggggatgcacggcacatacacagcgaatatggcgctttaccactgtgacttgctgatcagcatcggagcgcggttcgatgatcgcgtgaccggaaatctgaagcattttgcaaaatcggccaaagtagcgcatatcgatattgatcctgctgaaatcggaaaaattatcgaaacgcagattccggtggtcggcgacagtaaaatcgtccttcaggaattattgaagcaaaacggaaaacagggacagacagaggaatggaaacagcagctttcagaatggaaagaagaatatccgctttggtatacagacgacagagaagagggcttgaaaccccaaaagctgattgagtatattcaccaattcacaaacggtgaggcgattgtggcgacggatgtcggccagcaccagatgtgggcggctcagttttatcctttccgaaaggctgataagtgggtgacctcgggggggctcggcacaatgggcttcggccttccggcggccatcggagcgcagctggccgatcgtaacgccacggtcgttgccatcctcggagacggcggttttcagatgacccttcaggaattagatgtcatccggcagctgaatcttcctgtcaaagtggttatcttgaacaacgaatgtctgggcatggtcagacagtggcaggaaatcttctatgaagaacgctattctgaatccaaattctcggcgcagcctgactttgtcaaattgtcagaagcctacggcattaaaggcgttcggatttcatcggaagaagaggcggaagaagagcttaaaaaggcgctttcatcaaaagaaccggccgttattgacgtccgggtcgccaaaagcgagaaagtattcccgatgatcgcgccgggtaaaggacttcatgaaatggtgggggtgaaaccttgaaacgcattatcacattaacggtggtcaaccgctcgggggtattaaaccggatcaccggcctgtttacaaaaagacactataatatcgaaagcatcactgtaggccacacggaaacaagcggtgtttcaaggattacatttgtcgtccatgtggaaggcgaaaatgacgtagagcagctgacaaagcagcttaacaaacaaattgacgtcctgaaagtgacggatattacaaaccaatcgattgtacagcgtgagctggcattaatcaaagttgtttccgcaccgtcggccagaacggaaatcaatggaatcattgagccgttcagagcttccgtcgttgatgtctcaagagacagcatcgtcgttcaggttaccggcgaatctaataaaatcgaagcgctcatagagcttctcaaaccttacggaattaaagaaatcgcgagaacgggcacaacggcttttgcgaggggaacccagcagaaggcgtcatccaataaaacaatttcaattgtataacacaaaaaagggagagattaaaatggtaaaagtatattataacggtgatatcaaagagaacgtattggcaggtaaaaaagtagcgattatcggttacggttcacaaggtcatgcacacgcgctgaacttaaaagaaagcggaattgatgtcattgtcggcgtcagacaaggcaaatcatttacacaggcccaagaagacggtcataaagtcttttcggtaagagaagcggctgcccaggctgatatcattatggttcttcttccggatgagcagcagcaaaaagtatatgaagctgaaatcaaagatgaattgacggcgggcaagtcattggtattcgcacacggatttaacgtccatttccatcagatcgtgcctcctgctgatgtggatgtattccttgtcgcccctaaaggacctggacaccttgtcagaagaacatatgaacaaggcgcgggcgtaccggcattgtttgccatctaccaggatgtatcaggcgaagcgaaagatacggctcttgcttatgcaaaaggaatcggcggagcgcgtgcgggggttcttgaaacaacatttaaggaagaaacggaaacggatttgttcggtgagcaggctgttctgtgcggaggtttaacggcgcttgtcaaagcgggttttgaaacgctgacagaagccggctaccagcctgaactcgcatacttcgagtgtctgcacgaactgaagctgatcgtagacttgatgtatgaagaaggattggcgggcatgagatactctatttccgatacggctcaatggggagactttgtatcaggaccgcgcgtagtcgatgcgaaggtaaaagaatcgatgaaacaagtattaacggatattcaaaacggtacattcgcaaaagaatggatcgtggaaaaccaagtgaaccgtcctcgtttcaatgcgatcaatgcaagcgaaaacgagcatcagattgaaaaggtcggcagacagcttcgtgaaatgatgccgtttgtcaaacaaggcaaaaagaaggaagcggtggtctccgttgcgcaaaattaatgttttcgacacgacccttcgtgacggtgaacaatctcccggggtcaacctcaattcccgggagaaactggcgatagccaagcagcttgaaagactcggggtggacattattgaagcgggatttcccgcttcatcccgaggtgattttttagccgtgcaggaaatcgcaagaacgattaaaaattgttcggtaacagggcttgctcgatctgtcaaaggtgacattgacgcagcctgggaagcgctgaaagacggggtcagcccgcgcattcacatctttatcgccacctctgacattcatctgaagcataagctgaaaatgacgcgggaagaggttaaggaaaaagcggttgaaatggtgaagtatgcaaaagaacgctttccgatcgttcaatggtcggcagaagacgcatgccgcaccgaacttccgtttctggctgaaatcgtagaaaaagtgattgatgccggcgcgagcgtcatcaacctgccggacactgtaggttacctgacgcctgctgaatacggaaacatctttaaatatatgaaggaacacgttccgaatatcagccgggtaaagctctctgcccattgccacgatgatctcggaatggcggttgccaactcactttcggcaattgagaacggcgctgatcaaattgaatgcgccattaacggcataggagaaagagccgggaacgccgcgctagaggaaatcgccgttgcgcttcatgtcagaaatgacgcgcatcaagccgattcatctctcaatcttcatgaattgaagcggacgagtgatcttgtcagcaaactgacgggcatggccgttccccgcaacaaagcaatcgtcggagataacgctttcgcacatgaatccggcattcaccaagacggtttcctgaaagaaaaatcaacatatgaaatcatttcaccggaacttgtcggcgtgactgctgatgcgctcgtactcggaaagcattccggacgccatgcgttcaaagaccgcctgaatgcgcttggattccagtttgatagtgaggaaatcaataaattttttacgatgtttaaagaactgaccgaaaagaaaaaagaaatcaccgatgatgacttgatttctcttattttagaagaaaaagtgacggacaaaaaaatcggctatgaatttctgtctctgcaagtgcattacggaacgtctcaggtgccgactgcaacagtctctttgaaaaatcaggaaaacgaacagctgattcaagaggcggcaacgggggcgggcagcgtagaagccgtttataatacgctcgggcgctgcatcgataaaaatattgaactgacagactaccgcatccaatccaaccggaaaggcgaagacgcgctggctcaagtttatgtcagagtgaccgtgaacggaaaagaaacatcagggcggggaatcgcgcaggatgttctggaagcttctgctaaagcttatctgaacgccgtgaatcggcagttggtgctggattgcaatttagacggattaaagagacggactgcggtcggctcgtaatagaaaggagaacgtttgatttgaaaaaacgcattgctttgcttccaggtgacggaatcggaccggaagtggcggaatcagcggcagatgtattgaaaagcgttgctgaacaattcggacatgaatttgaatttgaaaacgggctgatcgggggagcagcgattgacgcccatcaaaacccccttcctgaggagacggtggctctttgtgaaagatccgacgccatcctgctcggggcagtcggcgggccgaaatgggaccaaaaccctccggagctcagaccggaaaaaggcctgctcggcatcagaaaaaagctcggcctgtttgccaatctgcgtcctgtgaccgtatttgaaagcctgtctgaggcgtctccgctgaaaaaagaatatatcagcggcgtcgactttgtaatcgtcagggaactgacgggcggcctctacttcggagaaccgagcagacagtatgtcaatgaagcgggagaaaaggaagcggtcgatacccttttttataagaaagaagaaatcgcacgcgttgtcagagaagcctttaagatggctgccggcagaaaaggaaaagtgacgtccgttgataaggcgaatgtgctttcttcaagcagactgtggcgtgaaacggcagatgaaatcgcaaaagaatttcctgatgtgacgcttgaacatatgcttgtcgataatgccgcgatgcagctcatctacgctccgagccagtttgacgtcatcgtaactgaaaatatgttcggcgatattttaagcgatgaagcctccatgctgacaggctcgctcggcatgctgccgtcagccagtttatcaagttcaggtcttcacttgtttgaacccgtgcatggatctgcgcctgacatcgccggtaaagggatggccaatccgtttgcggcgattttatcagcggcgatgcttttgagaacatctttcggacttgaaaacgaagcgcaggcggtggaaaaggcggtcgcaaaggtgcttgcagacggcagccgtacacgtgatatcgcccgggacggccaatatgccggaacgcatgacattactgaaaaagtaaaagccgcattagccggctcgaatacaaaatctatagtatgacgctttaaagaaagcggtcttagttcaataggtagagggaggaaacaaagatgatgcctcgaacaatcatcgaaaagatttgggatcggcatgttgtaaaaagcggtgaaggaaaacccgaccttctctatattgatctgcacctcattcatgaggtgacgtctcctcaggcgtttgaagggttaaggcagaagggaagaaaggtcagacggccgcagaacacgttcgcgacgatggaccacaatattccgaccgtcaaccgttttgacattaaagatgaagtcgcaaagcgccaagtaaccgcgcttgaacggaattgcgaggagttcggcgtccgtcttgcggatcttcacagcgcagaccagggaatcgttcatgtggtcgggcctgagcttggtctgacacttccgggaaaaacgatcgtttgcggagacagccatacatcgactcacggcgcgttcggagcgcttgccttcggtatcggcacaagtgaggtggaacatgttctttccacacagacattatggcagcagcggccgaaaacgcttgaaatccgcgttgacggaacgctccaaaaaggagtgacagcgaaggatgtcatcttgtcggtcatcggaaaatacggggtgaaattcggtaccggatatgtcattgaatacaccggggaagtattcagaaacatgtctatggacgaacgcatgactgtctgcaatatgtcaatagaagcgggagcccgtgcgggactgatcgctcctgatgacacgacgattgaatactgtaaaaaccgtaaatacgcgccaaaaagcgaggaatttgaaaaagccgccgcagaatggaaagcgttaaaaaccgatccgggcgccgtatacgatcattccatcgtgttagacggcagcgagatttctccaatggtaacatggggtgtcaatcccggcatggttcttccggtcgatgcccaaatacctgcgccggaaacgattgattctgaagacggtaaaaaagaagccatccgcgcttacgaatacatggggatcgcgccgaatcaaaaaattgaagatattaaagtcgagcatgtgtttatcggctcctgtacaaattcacggatgaccgatcttcgccaggctgcggatatgatcaaaggccgaaaagtcgccgacagcgtcagagccattgtggtgccgggttctcaaagcgtgaaacagcaggccgaggaagaagggctgcaccgcgtgtttctcgaggccggctttgaatggagggaatcaggctgcagcatgtgcctcagtatgaacaatgatgtcgtgcctgaaggggaacgatgcgcttccacttccaaccgcaacttcgaaggcagacagggaaaaggcgcgagaacacaccttgtcagtccggcgatggcggcaatggcggccattcacgggcatttcgtcgatgtaagaaagttttatcaagaaaaaacagttgtgtaaggagtgcgcgaaaagatggaacctttaaaaacgcatacgggaaaagcggccgtcttaaaccggatcaacgtcgatacggaccagattattccgaaacagtttttgaaaagaattgaaagaaccggatacggcagattcgcgttttttgattggagataccttgagaacggtgagcctgatcctgaatttgaattaaaccgcaaagtctatgaaggcgcgtccatattaattgccggagagaatttcggctgcggatcatcccgtgagcacgctccttgggcgctggatgattacggcttcaaaatcatcattgctccgtcatttgccgatatttttcatcagaactgttttaaaaacggtatgcttcccatccgtatgccgtatgatcagtggaaaaaactcgccggtcaatatgaaaatcagtctctaaatatgacggttgatttggaaaaccagctcattcacgacagtgaaggaaaagagatttcatttgaagtcgatccgcactggaaggaaatgctgattaacggttatgatgaaatttcattaacgcttctgctggaggacgacattcagcagtttgaatcgaaaagaagttcatggcttcaagcctgaaaaaagccgcccggcatctgtccggcggctttttttaccgtgtgcatcatcctttcttgtgtttcatgacgcgtgttgatacacttgaacaaaataagcgcctgaaaggaaataaagtatgacgcatgacaagaaaaaagctgatatcattcctttcccccgtctgaaagaacgcttggttgataaagggatggccgccatgaaggataaacagtatgaggaggccctcgaactgttttcagaggcggtaagccacggcgataccgagtccgacgtacatttaggcatggcgatttgttttctggaactcggggaattggaagaagcaaaacaagtttgcgagaaaatgctgaatgaagggtacggccattatttcaccgtattgcaggtgtacatgaccattttaattcagctgaaacaatatgaagaagtcaaaagcacaattgaagctgtgctggaagaaaaccagctgcccgcagaaagtgcggagcaattctaccggctgctcgaattcagccgcaaaatgaccgatcccgatcagcaggaggaggcgtgggaggaggaatacgaggacattcttgatacggaaaaagtgctgaacagccccgctgaacaaatgaatctgattcattctcttaaagaccgcaatattgcaaaatacacgggtctcttaaaaacgattcttcaagatccgggcgcgcatcctcttattaagacaatgattttgacgctgatggccgagcacgactacagtaaaccggtccatattacaaaattcggcgattcaatgaccgcgataccgagtgaaacggtccagcctgatgcggctccgattttgcatcgcgttctccgggtgcttgatgaaacgctgggcaatgaaaaccctacattatatgctgccgtcgaggagctgtggagaagacatctgtacgtcctgcacccttttatgccgaagtttttgaacgcggatttatgggcggcggcgcttcataaggtcggttacgagatgcacggcattgacattgagccggaggaacttcatatgatgtacgagtttgacagccgcgaactcgaagaagcctgcacgatgattaaggatattgaagaaatttcttatttgtaaatcacaccatatagttgaaagcggtaggcgttatgttataatatagtggttgtatttatgtatagcggtttaactgaaatgagaattacggttggacaggctgccagttcattacataatgattctgattcaaagcggttttttctttgacaaagccgcggattgctttagaatggaagaccgacacaacctgaatagatttttggagggaaacacatgtctgtaaaatgggaaaaacaagaaggcaacgaaggcgtattaacggttgaagttgatgcggatacgttcaaaacagctcttgatgatgcatttaaaaaagtagtaaaacaggtttctattcctggattccgcaaagggaaagttccccgcggtttattcgaacagcgtttcggcgttgaagctctttaccaggatgctttagatattttacttcctgtagaataccctaaagcggttgaagaagccggcattgagcctgtagaccgccctgaaatcgatgttgaaaaaatcgaaaaaggcgaaagcttaattttcactgcaaaagtgactgtaaaaccggaagtgaaacttggcgattacaaaggcttaggaatcgaaaaagatgacactgccgttactgacgaagatgtacaaaacgaacttaaagcgcttcaagagcgtcaggctgagcttgtcgtgaaagaagaaggcgctgttgaaaacggcgatacagtcgttcttgacttcgaaggtttcgttgacggcgaagcgtttgaaggcggaaaagctgagaactactcacttgaagtaggatcaggttcattcatcccgggcttcgaagagcagttaacaggccttgaagcaggcgctgaaaaggatgttgaagtaacattccctgaagagtaccacgctgaagagcttgccggaaaaccagctgttttcaaagtgaaaattcatgaaatcaaagcgaaagagcttcctgagcttaacgacgaattcgcaaaagacattgacgaagaagttgaaacgcttgctgaattaaccgagaaaacaaaaaaacgccttgaagaagcaaaagaaaacgaagctgacgctaaattgcgtgaagagcttgttctgaaagcatctgaaaacgctgaagctgatgttcctcaagcgatgatcgacactgagcttgaccgcatgctgaaagaattcgaacagcgtctgcaaatgcaaggcatgaaccttgagctttacactcaattctcaggccaagacgaaaacgcgttaaaagagcaaatgaaagaagatgccgcaaaacgcgtaaaatcaaacctgactcttgaagcgatcgctcaagcagaaaaccttgaagtaacggacgaagaagttgaagcagagctgactaaaatggctgaagcttacaacatgccggttgaaaacatcaagcaggcaatcggttcaactgacgcgatgaaagaagatttaaaagttcgaaaagcaattgattttcttgtagaaaaccgttaatatggttcataataatagacataataaaacagggcgcgattaattcgtgccttgttttgtacaattatgatataactctttttcttggggcaagatagtcattgccgggctgtttttcgtcatacatatagaatgtgcaagtgcgaaacacattgttaccgtcttactggaaagtatggtaaaatgcaatacatactcgatcgtagcaagaaccgttttcttttgcccttcaggtaaaagaaaaagtgagacaagattaaggggtgaaagaatgtttaaattcaacgaggaaaaaggacaattgaaatgctcgttctgcggaaaaacgcaagatcaggttcgtaagctggttgcaggaccgggtgtatatatatgcgacgaatgtattgagctctgtacagaaatcgtagaggaagagcttggtacggaagaagaagtcgaatttaaagacgttccgaagccgcaggaaatccgtgagattctgaatgaatatgtcatcggacaggatcaggcgaagaaatcacttgcggttgcggtatacaaccattacaaacgcatcaattccaacagtaaagtggatgatgttgagctttctaaaagtaatatttctttaatcggaccgactggaagcgggaaaacacttcttgcccagacgcttgcgcgtattctgaacgttccgtttgcgatcgcggacgctacatctctgactgaagccggatatgtcggtgaggacgtagaaaacatcctcctcaagctgattcaggcagcagactatgatgtggaaaaagcagaaaaaggcattatctatatcgatgaaatcgataaagtagcgcgaaaatctgaaaacccgtccattacacgcgatgtatcaggcgaaggcgttcagcaggcgctgctgaaaattcttgaaggaacggttgcaagcgtgccgcctcaaggaggacgcaaacatcctcatcaggaattcatccagatcgatacgacgaacattctgttcatttgcggcggtgcatttgatggcatcgaacaaatcatcaaacgccgtctcggacaaaaagtcatcggcttcggctctgataataaagcggcagacctggaaaaagaagaactgctttctaaagttcttccggaagacctgctccgtttcggtctgattcctgaattcatcggccgtcttcctgtcattgcaagccttgagcagcttgacgaaacggcactggttgaaattctgactaaaccgaaaaacgcactcgtcaaacaatacaagaaaatgttagaacttgatgatgtcgagcttgaatttgaaggcgaggcattatctgaaattgcgaaaaaagcgatcgagcgtaaaacaggcgcacgcggcctgcgttctatcattgaaggcatcatgcttgacgtcatgtttgatctgccgtcccgcgatgatattgaaaaatgtgtcattaccggagcgacagtcgcagacggtgaagcgccgcgtcttgtattaaaagacggtactgttgtcggccaagataaaacatcagcataacacgacaaaacctcctgacccgaattaatcaggaggtttttttcttgtcctgacccttctgaaaatgtttattccgggctttgctgggagatactagcggacagaggaatgaattggatacataaatcgttttttcaggagggaccagcatgagttggacagggatcgcattatttgtacagctgtttttcgggatagtcatcggactatatttttggaatctgctcaaaaaccagcgaacacaaaaagtgacgatagataaagaatcaaaaaaggaaatggaacagctgcgcaaaatgcgcgccatcagtttatcagaacctttatcagaaaaggtgcggccgaaaagctttcaggacattgtcggccaggaagacggaattaaagcgttaaaagcagcgctttgcggaccgaacccgcagcacgtcattatttacggtcctccgggagtcggtaaaacggctgcggcgcggttggtattggaagaagcgaaaaagcataaacagtcaccgtttcaaaagcaggctgtttttgttgaacttgatgcgacgaccgcgcgatttgatgaacgggggattgccgatccgcttatcggttcagtgcatgatccgatttatcagggagcgggtgcgatgggccaagcaggcattccgcagccgaaacagggggctgtgacccatgctcacggcggggtattgtttattgatgaaatcggcgagcttcacccgattcagatgaataaaatgctgaaggtgcttgaagaccgaaaagtatttttagacagtgcgtattacagtgaagaaaatacgcaaataccgaatcacatccatgatatttttcaaaatgggcttccggcggatttccgtttgatcggagcgacaacgagaatgccgactgaaattcctccggccatccgttcgcgctgtcttgaagtatttttccgcgagctggaaaaggatgaacttaaaatcgttgcgaaaaaagcagccgacaaaattcagaaagagatttctgacgaagctctcagcgtgctgaccgcatatacgagaaacggacgtgaagccgtcaatatgatccagatcgctgccggcatggcggtgactgaggacagaaaagaaatcacgactgaagatatagaatgggttgttcattccagtcagctcacacctaaaaatgagcagaaaatcgccgatgaaccgcaagtcggcatcgtgaacggacttgccgtctacgggccgaacagcggcgcattgctggaaatcgaagtgaatgtcacacctgcgcaggacaaaggaagcctgaatatcacgggaattgcagaggaagaaagcatcggcagccaatcgaagtcgatccgccgcaaaagcatggcgaagggatctgtggaaaatgtgctgacggttctccgcacaatgggcatcaaaccttcagactatgacattcacgtcaattttccgggcggaggcccgattgacggaccttcagcaggtatcgcgatggccgcggggattttttccgcgattcaccgcatcccgatcgaccatacggtggcgatgacgggagaaatcagcctgacggggcttgtcaaaccgatcggcggcgtcattccgaaaattaaagccgcaaaacaggccggagcaaaaacggtcattatcccttatgaaaatcagcagtccattctgaaacgaatagacggaatcaccattaaagcggtaaaaacgttccaggaagtgcttgacgtcatattggttgaccctccttcagaacaaaaaccgtttgatatccaaatgaataaagaatccgtataaaccccatttttataatggggtttttttatggaggacatcttttcctttttcagaacagaaagaaagggtatactacgaagagactgttttatatacagggcaggcggataagccgattaaagcccgatcccggaattgtacaacgatgaaaaagttgtattataatggttcatactaaagtcacggaggtgtcagtcacatggcagaagatacaaaacgcagcatcccgctcctccctttaagaggcttattggtatacccgacaatggttttacatttagatgtaggccgtgacaagtcggttcaggctcttgaacaggcaatgatgcatgatcatatgatttttttagccactcagcaggatatttcgatagacgaaccgggtgaagaggatattttcgccgtcggcacttatacaaaaattaaacagatgctgaagctgcccaacggtacgatcagagtgcttgtagaaggaattcagcgggcgcagatccttgaatacaccgaactcgaagattatacttcggtcgatatacagctgatgcatgaggatgattcaaaagacgtggaagacgaagcgcttatgcggacgctgctggaccattttgaccagtacataaaaatttctaaaaaaatttccgcagaaacgtatgcggctgtgactgatattgaagagcccggcagaatggcggatatcgtcgcttctcatctcccgctgaaattaaaggacaagcaggacattctagaaacggcggatattaaagaacgtctgaataaggtcattcgttccattcataatgaaaaagaagtgctggagattgagaaaaaaatcggtcagcgcgtcaaacgttcgatggaacgcactcaaaaggaatattatttgcgcgaacagatgaaagccattcagaaggagcttggcgacaaagaaggaaaaaccggcgaagttcagtcgctcacggaaaagatagaagaagcaggcatgcctgagcgtgtcaaagaaacggcgcttaaggaattaagccgttacgaaaaagtgccgtcaagctcagcggaaagctctgttatccgcaactatattgactggctcatcgcccttccgtggtcggatgaaacagaagataaacttgatattaaaaaagccggggaaatcttagataaagagcatcacggcttagagaaagtgaaagagcggattttggagtatttggccgtgaaacagctgacgaaaacgctgaaagggccgattctttgtctggccggacctccgggagtcggtaaaacatctcttgcaaaatcaatcagtaagagcatggggcgcacttttgtgagaatttcactgggcggagtgcgcgatgagtctgaaatccgcgggcaccggcgcacatacgtcggggcgatgccgggccgtattatacaggggatgaaaaaagccggcaaacaaaatccggtctttctcctcgacgagatcgacaaaatgtcgtctgatttcagaggcgatccgtcttcggcgatgcttgaggtgctggatccggaacaaaacagcacattcagcgaccactatattgaagagacgttcgatttatcgaaagtactgtttatcgcgactgcgaataaccttgcttccatccctggccctctcagagacagaatggagattatcagcctgtcaggctacactgaaaacgaaaagctggagatcgtgaaagatcacctgctgccgaaacaaatcaaagagcacgggctcacaaagagcaacctgcagattcgggatcaggcgattacggacatcatccgctactacacgagggaagccggcgtgagaacgcttgaacgccagattgccgccatttgccgaaaggctgcgaaagccattgtgtctgaggagagaaaacgcattaccgttacagagaaaaatctggccgactatctcggaaaacggatattcagatacggacaggcggaaaccgaagatcaaatcggggttgtcacggggctcgcgtatacgacggtcggcggagatacgctgtcaatcgaagtgtcattgtcaccgggaaaaggaaagctggttctgacagggaagcttggagatgtcatgcgggaatcagcgcaggccgctttcagttatgtccgttcgaaagcggaacagttcggaatcgacccgaaattccatgagaagtatgacattcatatccatgtccctgaaggagcggtgccgaaagacggcccttctgccggaattacgatggccacggcgctcgtttcagcattaacggaccgtgcggtaaaacgcgaagtcggtatgacgggagaaatcacgctgcgggggcgcgtgcttccgatcggcggactgaaagaaaaggcgctcggcgcgcacagagcgggcctgaccactattattgcgcctaaagataacgaaaaagatatagaggatattccagaaagcgtcagagaaggactgaagtttatattcgtttctcacctggatgacgttttggaacatgccttagtaggagagaagaaatgaaagtcacaaagtcagaaatcgtgatcagcgcggtcaaacccgaacagtaccctgatggggggcttccggaaatcgcgctggcgggcagatcaaatgtaggaaagtcatcttttatcaattcattaatcaatcggaaaaacttggccagaacgtcatcaaaaccggggaaaacacagactttaaacttttacatcatcaatgatgaattgcattttgtcgacgttcccgggtacggatttgcgaaagtttccaaaagcgagcgggaagcatgggggagaatgattgaaacctatatgacgacccgcgaagagctgaaagcctgcgtgcagattgtcgacctcagacacgcgccgtctgctgaagacgtgaacatgtatgaattcctgaagtattacggcattcccgtcatcgtcattgcgacaaaagcggataagattccaaaaggaaaatgggacaagcacttaaaggttgtcaaacagacgcttgatatggatcctgaagatgagctgattttattttcctctgaaacgaaaaaaggcaaagatgaagcatggggagccattaaaaaaatgatcagccggtaatgaaaaacccaaaacgcagtgcgttttgggttttatcgtatagttttgttccgcttgataaacaataataaaaggctgattccgatgaaaacatacggccagtatgttttgaagtgttccgtcggaatatggacggactccagccacgccgtaatttgtttaaagaagtataaaaagagggaaaaaccaatcatggcagccgcttcgtatacatattcttttctggcagccgcaaataaggagaatccgaagacgaagagaatcatttcaaaatctcccggccaccatgagagctcaggtttggcgaaaaagtgtaaacctatgccgaaaagaagcatgccgatcaggacgtgaggcccggccgcttcctttttgccctgatacaagagcacagcccccaagagcataaggagcaccggccattccccctgattcgcaaacaggtgaacctgtccgctctgaagccatgcaaataatgaagcggcaagcagaagtcccggtaataaaattgatgtttttttcatcctgtcacctacccgcagtaaaggatttttagtatgatgattacagtgggaacgagctttttatactatagcataacatttttgaaatctgttcacattttcccgaagaaactatgttataattattataaataataaattctatgttagaatgattataaataaattgcgatgtacgggggtgcatgaaagcgatgcatattcttgttgtgggagtagattataaatccgcccctattgaaatacgcgaaaaaataagttttcagccggatgagcttgcagaagcgatgctccgcttaaaagaagaaaaaagcgttctagaaaacattatcgtgtcaacctgcaaccgcaccgaaatatatgcggtggtcgaccagcttcataccggccgttattatataaagacatttttatccgaatggttctcgctgccgaaagaagagctgtctccgtttctgaaattttatgagagcgacgcggcgatcgagcatttattccgtgtggcgtgcggtttagattccatggtcatcggagagacgcaaatactcggccaggtacgctcgagctttaaaacggcgcaggcagaaaagacgatcggcaccattttcaatgagctgtttaaacaggcggtgaccgtcggcaaacgcacgcatgccgaaaccgatatcggctccaatgccgtttccgtcagttacgccgccgttgaactcgcgaaaaaaatcttcggctcattgtcaaataagcacattttgattctcggtgcgggaaaaatgggcgagctcgccgcagaaaacctgcacggtcagggtatcggcaaagtaacggtcatcaacagaacgtttttgaaggcaaaagcgcttgctgaccgtttctccggagaagcgcgcagcttaaaccagcttgaatatgcacttgctgaagctgatattttaatcagttcgacaggcgcgagtgatttcgtcgtgtctaaagaaatgatggagagagcgggcagacagcggaaaggccgtccgttatttatggtggatatcgctgtgccgagagacctcgatccggcgcttaacgatcttgaaggtgtttttctgtacgatattgatgaccttgaaggaatcgttgaagccaacttacaagaacgccgcgaaaccgctgaaaaagtcgagctgtttattgaagcggcaattgttgagtttaagcagtggcttaatacgctcggcgtcgtgccggtcatttcggcgctgcgtgaaaaggcgctgtccatccagtccgatacgatgcagagcattgagcgcaagctgcctcatctgacggtgagagagaaaaaacttctcagcaaacatacgaaaagcatcattaaccaaatgctgcgcgacccgattctgaaagcgaaagagcttgcggctgaagcggattcagatgaaaagctgaagctgtttatgcagattttcgatattgaggaagaggccggccgccagctggacaaaagcctggataaccgccagacggttcattcgtttcaaaaggcagaagcaaaaacgggcttacgtccgcttgtaagtgagtgagggctgtatgattgatacagcaatggcaagacttaatgaagcgacaattgttatttatgcagtaagcgtccttttttactttatagattttcttcaacacaaccggaaggctggaaaaatagccttctggttgctttctattgtctggactctgcaaactgtctatctttcttatttcatgtggcagacgggcagatttccggtcttgaatattacagaggccctttacttttatgcgtgggtgcttgtcacgctttcacttgtggtcacgcagattctgcgggttgattttatcgtgtttttcacgaatgtcatcggtttctcgatgattgcgatccatacgttttcaccgacggatcagcattcggccgccttttccggccagctggtctcagagcttttggtcattcatattacaatggcgattctgtcttacggcgctttttccctttcttttgtcttttcgcttctttatcagtttcaatattctttattaaagaagaaaaaatggggaaaatggctgttgagaattgaagatttgtcaaaacttgattatatggcttacgttttaaatgtcatcggggttccgatgctgctgttgagcctgatattaggcgtgatctgggcgtatgtgtcgctggaaacgctgtactggtttgactcaaaagtgctcggctcgtttattgtgctgcttttatacagctactatttatatatcagaatgattaaggaactgcaggggaaagtggcggcgttatggaattcagcatgttttctcgtgctgatgattaattacttcctgctcggaagcctgtcacaattccattggttcagttaacgcacgcgcccaaacagattcgggaggaaagaaaatgagaacgattaaggtaggttccagacggagcaaactggctatgacccagacaaaatgggtgattaacaaactgaaggaattgaatccttcctatgactttgaaatccgggagattgtcacaaaaggcgaccgcatcctcgatgttacactgtcaaaagtgggcggcaaaggtttgtttgtcaaagagattgaacaggcgctgctgcatcaggagattgatatggcggttcacagcatgaaagacatgcccgccgttttgcctgagggtcttgtcataggctgcataccgaaacgtgaggatccgcgtgatgcgctcatttcaaaagggcatcaaaagctggacggcataaaagaagggggcatcatcggcaccagcagtttaagaagaagcgcccagattcttgctgaacgccctgaccttacaattaagtggatcagaggcaatatcgatacgagacttcaaaagcttgaaacggaagattacgatgctattattttagcggctgcggggctttcgagaatgggctggaaagatgatgtcgtatcggaattcctcgaaccggaccgctgtctgcctgcggtcggccaaggcgctcttgccattgaatgcagagagtcggatgaagagcttttgaagctgtttgcgcaatttaccgatgagtatacgcagcgcacggtggcagccgaacgggctttcttacacgcgatggaaggcggctgccaagtgccgatagccgggtatgcgtccgtcaatgaccgggatgaggttgaattggtcggtcttgtcgcgtctccggacggaaagacgatttataaagaaacagcggcgggacatgatccggaagaaatcgggaaacgctgtgcggcgatgatgtctgaaaaaggagccaaagcactaatcgacagcgtgaaacaggagctcgaacaggatggcaaatgaccttcctttacaaggaaagaccgtgctcgtcacccggaacaaaagacaggcagcaccgtttcgaaaaaaagtggaggcgctcggcggaacggctgtttccgcctctctgatcgcttttcaggaagcgctcccggatgaatgtgcggacagtctgcgggaagacctttctgaaccgggctggcttgtgtttacaagcgtaaacggtgtccggttctttttttcctaccttgatcagcatggccttgcgcttccggaacggaaaaaaatcgcagccgtcggtgaaaagacagcgcgcgccctgaaagagcggggagcccggacggatgcgatgcctgacgagtatgtggcggaatgtctggctgatactttaaaacggcacgcatcagctgccgaacccgtttcattgataaagggcaatttatcacgcgatgtcataaaagcggagcttgagccgcttggctatcaaataagggaatgggtgttatacaataccattcaggatgaaaaaggcatggacgagctgagacgggctgcatcccgctctcattttgattttattacgtttaccagttcatcggcggtgcatacgtttatgcacgcggtcggagacggagaaaaagcgtgggaaaacagcggtgcgagctatatcagcatcggccctttgacagagaaagcgctcttggaatacgggatctcatcccatgtgcctgacacctatacgattgaaggcatgctggacgtcatgtgcagcatgtcgggaaaggatagataatgatgaatcaaacatttaacagacaccgccgtttgcgcgcgaacgctgcgatgagagatctagtaaaagaaacacgtcttcacccttcagattttatttacccgttatttgtcgttgaaggactcgaaggaaaaaaagaagttccttccatgccgggggtttatcatgtatcactcgatttgttaaaggatgaaatggctgagctgatatcgctcggcattaagtcggtcatcgttttcggtgtgccggaagaaaaagacgcctgcggaacccaggcttttcacgatcatggcattgtgcagaaagggattgctgaaattaaaaagcattatcctgaaatgatcgtcatcgctgatacatgtctctgtgaatacacggatcacggccattgcggggtcgtgaaagacggagtaatcctcaatgacgagtcgcttgagctgctggcgcagacagccgtcagccaggctaaagccggcgctgacatcatcgctccttcaaatatgatggacggttttgtcacagtgatcagggaagcgctcgacaaagaaggattcacgaatattccgatcatgtcttatgccgtgaaatattcaagtgaattctacggcccgttccgcgacgcggctgacagcacgccgcagttcggtgaccgaaaaacataccagatggatccggccaaccgcctggaagcgctacgtgaggctgaatcagacgcggcagaaggcgctgactttttaatcgtcaaaccgtctatgtcatacttagatattatgcgtgatgtgaaaaaccgccatcacctgccgctggtcgcatataatgtgagcggggagtattccatggtgaaagcggcagcccaaaacggctggattaaagaaaaagaaatggtgctggaaattttaacgggcatgaaacgtgcaggagccgatctgattatgacgtatcatgcaaaagacgcagcgaaatggcttgctgagtaacgatttcatttgacgggagctgaggcagatgagaagctatgaaaaatcaaaagccgcttttaaagaagcgcagaaactgatgccgggcggagtgaacagcccggtgcgcgcgtttaaatcagttgatatggacccgatctttatgcagcgcggcaaaggatcgaaaatttttgatattgacggcaatgaatatatcgactatgtgctgagctgggggccgctcattttgggccacacgaacgacagggtcgttgaaagcctgaaaaaagtagccgagaacgggacaagtttcggggcatctactgaagtggaaaacgaactggccaaattggtcattgaccgtgtaccgtctgttgaaatcgtgcggatggtcagctccggcacagaggcgacaatgagcgccctgcgtctggcaagaggatacaccggccgcaacaaaattttgaaatttgaaggctgttaccacggccatggtgattcgctgctgatcaaagcgggatccggagtggcgacactcggcctgccggacagcccgggcgtgccggaaggaatagcaatgaatacgattaccgttccatacaacgacttggaaagcgttgcactcgcattccgggagtacggtgaagatattgccggggtcattgttgaaccggtagcaggcaatatgggcgttgttccgccgcaggaaggctttttacaaggacttcgcgacattacggaacagtatggcgcgctgctcatttttgatgaggtcatgaccggttttcgcgtggattataactgcgcgcaagggtatttcggcgtgacgcctgacttaacgtgtctcggcaaagtcatcggcggcggtcttcctgtcggtgcgtatggcggaaaagctgacattatggaacgaatcgcgccgagcggtccgatctaccaggcgggaacattgtctggaaatccgcttgccatgacagcgggacttgagacgttacagcagctcacacctgaatcttaccaagaatttgtgaaaaaaggcgatatgcttgaagaaggcatttcaaaagcagctgcagcacacggcattccgcacacgtttaaccgggcggggtcaatgatcggcttctttttcaccaatgagcctgtcattaactatgaagcagccaaatcttctgatttaaagctgttcgccaagtattataaagggatggccgacgcaggcgtatttctgccgccgtctcaatttgaaggattgtttctctccactgcgcatacaatggaggatattgaaaataccattcaagccgctgagaaagtgttccaggcgatcagccgctgataccgaaaagccgatgcaagcaagacttgtatcggcttttttcaatgcctccattatcatattttcccggattgcggcatacacctttagtgacatctaattgtatggattagatgaaaggaggatatgaacttgccgcataatcaccgattgcaattttctgttgaagaatcaatctgtttccaaaaaggacaggaagtttctgaattactttcgatttcattagaccctgacatcagggtgcaggaagtaaatgattatgtctcaattaaaggatcattagaacttactggcgagtacaacatagatcacagcagtcattttgaagagcttgatagggagctgaggcatgtagaggaagtgagggcgagggaggatggcacggccgagctcattcattgtttcccggtggacatcacgattccgaaaaataaagtgagccacctcaatgatgttttcgtatttattgatgcctttgattatcagctgacggattcaaggatcttaaccattcaagctgatttggcaattgaagggctgcttgaggaatccgagccgaaagagccggagatccctttgtacgtggcgcctgaattttccagagaagaaatgatcaatcttgccggacatcattctgaggacgaaaatgaaccagaattaatgatacgccatgagcctgaaatacctttgactgtatcagaagaagcagcacaagaaacagagaagaacgaggaagaaatcccgcctttactcaggcaggaggaagaagagcaggaaacagccccgattctgagggagcgggaagaagaaaagcaggaaacagccccgattctgagggagcaggaagaagagcaggaaacagccccgattctgagagagcaggaagaagagcaggaagcagccccgcttctgagggagcaggaagaagagcaggaagcagccccgcttctgagagagcaggaagaagagcaggaagcagctccgattctgagggagcgggaagaagaagagcaggaagcaggcccgattctgagggagcgggaagaagaaaagcaggaaacagccccgattctgagggagcaggaagaagcgcaggaagcagctccgattttgagggagcgggaagaagaagagcaggaagcagccccggttttgagggagcaagaagaagaagagcaggaagcagccccgattctgagggagcaagaagaggtgcctaaacctgtttcctttactgagcctcctcctcccgtttccttccagcacgaagaagagccggaagaagctgaggagcctgcaatcatgtcagctgtgaggaatgaacccgtatttgaggatgattcagcagaagtgcaggaagagccgaaagatgatatcgaaccggttttccctgctttcactctgactccgcatgcagaaaaaccaaaaattgcggaacagcccttccttcaaaaagaagagcagccagaggccgagccgcttctccgtcagagcgatcataaggcggcagaagacgaagatgagcctgcggtttttcaagaggagcaggcgcccgtttatcgcgagttcgttccggaacggcaggaagaggagttttacagcgctcctaagctgcttgaagaagaggctcatggtgaagaagggtttgaaattgaggtaaggaagatggcgccgccggaggaggaaaccgggaagcctctcgatttgtcttttcagttttccaaactgccgcctgaggagccggcgcaagctgaacagcctgagccgcttaagcctgaaagaaagaatgaagaagcggcaccgggaaccgagcagaaggaaaatgacaactctcattacttgacaaaattatttacaagggaagaagaaaagttttcaagaatgaaaatttgtatcgtgcagcagcaagatacaatcgaccgggtgtgtgaacgatatgacattacatcccagcagctcatccgaacgaatgctttatcgtttgatgacgagcttgaggaaggtcagcttctgtatatacctgaatataataacagccatgtgtaagcacaaagaggccgtaaaaatgtggtgaatggaatggaagcagtccaatcagtgcttcaggaatacgggctggcggctgagtatattgagcctgtcagcccgcatgtttggaaggtctactcaaactacggcatttttgctttgaaacagctcaagccggcccgcagcagtgaatttacggatcttatgattgagattgaggagaaaggctaccgatcatttgtgccgatctgccgcacgtatgccggcgatttttttgcggggagacagacggagaattcttattatttaatgccttggcttcagtacgatcaggaggaagaacgggatcaaaaacatgtttacctttttaaagaggtcgcgaagctccattctgcgactgtgcgggacatccaaatccggactgaagatatcagcggcttttatgaagcaacgaaaagagattgggaaaatgataagcttgtctatgaacaattcgccgaccgggcggaaaaagagtggtacctttcaccttttgaactgcaggccgttacgtatcttacagaaacggtttccgccgtcaattttgctctggaacgtctggaagaatggtttgacgcggcaaaggatcatgacaagacgagagcggtgatcaaccacggcagtttatcgagccgccactttctgtataatgatgcgggatcgggctttttcacgaatttcgagaaagctgcgctgggccctccgcaaaatgacctgctcggcttttactccagaatgttcagaagctatccgaaagcatgtccggaatgtctggactggttttatacgtatcacaaatcattcccgctccgtgaagcggaaatcagtctgtttctcagctatatggcttatccgtccgccatgtacaaagtgctgaaacggtatcagaccggccaaaggggctctgaaaaagaagagtgcacgcaattattaagagcgttttggcagatgaaaaatgttgagccttttctcatgaaggttcatcagattgagcgggagaaaaaaataaaagcggaaaacgagtcctcttcataacaggactcgtttttttatatccattccaaatgcagggcgcacgctaaaaacagcaggatggcaagcagcaggacatcaaaagtcgtcggaaagaaaatcgtcctgatcccctgaaagatcgtaatcggaataatgacttgcacggatacaaggcggacctgtctggcccactgggggagcgaataagaattgaatttttttctcacgggcaattcctcctcacattcgcctttctatgtatcgtatgtaaggggaagagcggggtgcatgcccatttatgtatgacggcagcggtttttggaaaagatgattgacgaatcaaaaacacttttactataataaagaacataataaataagatcatgagctgatataaatacacctgctttgaacgggaagagtacaagaaagacgcatgaagagagagaagctactgtgctgaaaggcttcttatgccgtctcattggaaggtcgcccgggagcataatttcttgaacatacagtagagaaattcgggccgcacccgttatccgtttaagtgcatgaacaaatctgttcatgaaaaaaggtggtaccgcgaaagagcttttcgtcctttatcaggatgaaggctcttttttagttgctcagccatttctaaacatgctggagggttatcatggatacaaacgaacaaacaatgccgacaaaatatgatccgtctgcgattgaaaaaggccgctatgatttttggctgaaaggaaaatattttgaagcgggcggcgatcaaacgaaacagccgtattctgtcgtcattccgccgccgaacgtgacgggcaggctgcacctcggacatgcgtgggatacgacgctgcaagatatcgttacgcgtatgaaacgcatgcagggctatgacgtgctctggcttccgggcatggaccacgccggcatcgccactcaggcaaaagtcgaagcgaaactccgcgaacagggcacaagccgttatgacctcggccgtgaaaagtttttagaagaaacgtggaagtggaaagaagagtatgctgatttcatccgcagccaatgggccaagatgggactcggactcgattattcacgtgaacgtttcactcttgatgaagggctgaacaaagccgtgcgtgaagtattcgtcaagttgtacgagaaaggcttgatttacagaggcgaatatatcatcaactgggaccctgccacaaaaacggctttatccgatattgaagtgatttacaaagacgtacagggcgcgttttatcatttgcgctacccgttagcagacggttcaggctcaattgaaatcgcgaccacccgtccggaaacgatgcttggcgacacggctgtcgcggttcatcctgaagatgagcgctacaagcacttaatcggcaaaacggtgattctgccgattacaaaccgtgaaattccgattgtcggcgatgattatgttgatatggaattcggatcaggcgccgttaaaatcacgcctgcccatgacccgaatgactttgaactcggaaaccgccacaatttagagcggattctcgtcatgaatgaagacggaacaatgaatgaaaaagcgctgcaatataacggcatggaccggtttgaatgccgtaaaaaactcgtcaaagatcttcaggaatccggcgttctctttaaaatcgaagaccatatgcattctgtcggccacagtgagagaagcggcgccgttgttgagccgtacctgtccacacaatggtttgtcaaaatgcagccgctggccgatgctgcggttgaccttcaggcaaaagaagagaaggttcacttcgttcctgaccgtttcgagaaaacgtacctgcactggatggaaaacatccgtgattggtgtatttcccgtcagctgtggtggggccaccgcatcccggcttggtatcataaagaaacaaaagaagtgtacgtcggccttgaggcgcctgaggacagcgaaaattgggagcaggattcagacgtgcttgatacatggttcagctccgcgctttggccgttttctacaatgggctggcctgatgaaaacgctgaagactttaagcggtattactcaaccgatgtacttgtaacgggatatgacatcattttcttctgggtatcccggatgattttccaaggtcttgagtttaccggcgagcgtccgttcaaagacgtgctgattcacggcttaatccgtgacgagcagggcagaaaaatgagtaaatcccttgggaacggcgtggacccgatggatgtcatcgacaagtacggagcggattccctgcgctacttcctggcaaccggaagttcaccgggacaggatctccgtttcagctatgaaaaagtggaatccacatggaacttcgcaaataaaatttggaacgcctcccgttttgcattaatgaacatggacggcatgacgtatgacgagcttgatctgtccggtgaaaaatcagttgctgataagtggatcctcacaagactgaatgaaacgatagaagacgtgacacagcttgcggatcgttatgaattcggtgaagtcggacgccacctgtacaactttatctgggacgatgtgtgcgactggtatatcgaaatggcgaagcttccgctgtacggggaagatgaagcggcgaagaaaacaacccggtctgttctggcatacgtgcttgaccagacgatgcgtcttcttcacccgtttatgccattcttaacggaagaaatctggcagcaccttcctcatgaaggcgagtcaatcacgatcagctcttggccggttccggtgccggaacatacggataaagaggcagcggcggatatgaaactgctcgttgaattaatccgttctgtccgcaatatccggagcgaagtcaacacgccgatgagcaagcaggttgaactttacattaaaacatctaccgaagacattgccggccgccttgagaagaaccgttcttacgttgaacgctttacgaatccgagcacgctgaaaatcgggacggatatcgctgcggcagacaaagcgatgacagctgtcgtcaccggagcggaagtcattctgccgcttgaagggctgattaacattgatgaggagatcgcccgtctgcaaaaagaattcgacaagctgacaaaagaagtcgaacgcgttcagaaaaaactcggcaacgaaggattcattaaaaaagctcctgagcatgtcattgaagaagaacgcggaaaagagaaagactacacggcaaaacgcgaagctgtccggcagcggattgcagagctgaaaggctgataaaacagcggggcggtttcctaagaaaccgccttgtcgtataaaagaggggatttcattgtttaatacgtacaaagaagcgatcagctggattcacggcagactcaagttcggcgttaagccgggccttctccgtatggaaaagctgatggaaaaactggaacacccggaaaagaacattcgcgccattcatgtggcgggcacaaacggcaaaggatcaaccgtttcttttatccgttccgtccttcaagaagccggttatacggtcggcacgttcacatcgccttacatgattacgtttaatgagcgaatcagcgtcaacggcacgccgattaccgatgaggaatggagaacgctcgttaatgacataaaaccgatagtcgatgagcttgataagaccgatgccggaacggtgacggaatttgaaatcattacagcgtgtgcatttttatattttgcgaagcgggctgatatcgattttgtcatttttgaagcggggctcggcggcacatttgattcaaccaatattgtgaaaccgcttctgtcggtcattacaagtatcggacatgaccatatggccattttaggcaataccatcgaggagatcgccgggcagaaagccggtattattaaaaattccattccggtcattacgggcgtcaatcagccggaagcactcggcgttattgaagcggaagccgaaaaaaagcaggctccgtatcagtcactatataaaacgtgcagactgtttaatgaagcggcgcttccgtccggcgaaagcttttcgctggaaacagaaacgaaatgctatgaaaacattcaaacgtcgctgatcggcattcaccaaaggcagaatgcggcattggcgatattggccgctgaatggctgaatcgcctggaggccgcagtcatttcagaagaagcgatgcgaaacggactgggaaaatcttcctggccgggccggtttgaacgtcttcaaagccgccctttagtgtttgcggacggcgcccataacgaagagggtgttgaaacgctgacagaaacgatccggcagcgctttgccggtaaaaacgtccatgtcgtattcagcgcattaaaagacaaaccgtatcaggaaatgattaaaaagcttgaaaccgaagcggattccattcactttgtatcatttgactttccgcgtgcttcaagcgccgaagccctttacaatgcaagcagtcttgcatctaagagcttcgatgagaacccggacagtgtgaaagaatggatagaacaaaaagacggggcggatgatgtcatcatcattaccggctccttatattttatttcagagatgagaaagcggcttatctgacagcctctcggatgcccggcagaccattttccggttttgccgggtgtttttatgctgaaaatatattttcagccatttcagtcatggtgtttttctttgctataatctgagccagattgatagtaaaggtgtggtctgagtgcttttaattctgttttttctcggcttgattttcggttcttttttttatacagcagcgtgccgtatcccgctgcgaatctcggttatttcgccgcgttcatcctgttcgttttgccgcttgccgctctcctggggggagcttgtgcccgtcgtctcctatattctgcaaagaggcagatgcagaaactgccgtgcgaagctgtcggttatgtatccggcggcggaatgctggacggcgtgtttattcacggctgcaggcattcatttcggtttctcaaaagaactgttagtcgcgctgttatttctgtctctcctcatgattgttactatgacggatctgcaatatatgctgattcctgacaaagttctgctgttttttcttccgcttttcatcgccggccgaatgttttctccgctggattcatggtatgcagggtttgccggagccgtttgcggattttttctgcttgtttttatcatgtttgtcagtaaaggaggcatcggcgcaggtgatgtgaaactgtttggggtgatcggcctgacgctcggcgtgaagctcgtgctcattgcattctttctttccgttatgatcggagcggtatacggtatgtgcgctgcagcccggggcagtcttggtaaaaagcagccatttccgtttgcgccggccatctcagccgggagcgctttgagttatttatacggtgatgagctgttttcgttttacatcaagctcgcttcaggcggggcttgaaaaatttggcgaacgttttttggacaagacgacaaaagtcttgttcttttttttttcgcctatgctaaagtgtgaaccatgatcagttcaaggtacggccaagacgaatgcaagggggaagagacgttgaaaaaaaggaagagcaaaaagcacagcaaagctaaaaacaatgcccttaaagtaaccattaacggacaagaagaaacgatgtatggacaagaagatgtgaatgaaggcggggagaagaccgtcacattttccaattgggaagaaacaaaaaaggcggaacaggagaccgccgcttcccatgaagatccgaaagaagaagatttcaattgggatcatgagaagaattctgaggtatttgaagatgacccgaaagtcgttccgccataccagaagaaaaaaacaggccctcattttccgaaaaaaaagcagccgtcttctccagttaaaaaagcggtcacgacaattgccgttgcggctgttttaggcaccgggctcggccttgtcgccttaaatatgtcgggaagtaaagaagcctccgctccggcatcagctgacaaaggttcacaagggcagacggtgaaagcgggagatgtttctaacgacaaatctgaaacagccggcacaggagatgcggaatcttcagcgggaaactataaaacatatgcggtgcaggccggaaaattttcatcagaaaaaggagcgcaaacgcttgttgaccagctgactgaaaaaggatactcggccgtctctctggcaaaagaagacggatacacatacgtgatcgccgggcttgcagcggaaaaaagcttatcacagcaattgggtcagacactgatagaccatgattttgaggcttggggcggaaaagagctcagctttgcggtcgattcagggctggaagactcttttaaacaggcatctgagctctccgccaaagcgattaccggcaaaaatctttcaaaaacggaagtggctgaagcggcaaaagcggcagacggcgcagacgccgctgacaaaaagcagaaagaggccgtgcttcaagcgctgaaagaactggaaacgtcgggttcggaatccggctggaaagcccaaaaagagctattaagtgttgtaaaatagtatctcatttcccgtcatccggcgggattttttattttgtcatcaaaaagttatttttctgaaattgtggttgcccgtttgatttggtaggatagacaagtatctttttttcttaagcaaaccctgaaaggatgacaaccatgacaaaacgcttaatactcgcatcacaatctccgcgaagaaaagaactccttaatcttcttcagattccttacagcattattgcgagccgcacagaagaaaaattaaatcgaaacctttcgccggaagaaaacgtccaatgtttggccgagcaaaaagctagtgctgtattggccgaaaatcccgatgcagtcgttatcggggctgacacgatggtgtgcatagacggcgagtgcctcggcaaaccgcgtgacagggaagaagcggcacagatgctgcggaggctttccggccgaagccatcaagtcattacggcggtcagcattcagacgcgtgaccggaaagaaacattctgtgacacaacggaagtgacgttttggccgctcagtgaagacgacatacagctctacattgaaacaaaagaaccgatggataaagcaggtgcatacggcatccaaggaaaaggcgcgcttttagtgaaaaaaatagacggtgatttttattctgtcgtcgggcttcctgtcgctaaaacaatgagagccttgaaagaatttaatataaaagcttgatgttcaaaccgggaaggggaacaaggaggggttgatcatccgtgatctgccgttaaaattaagagatttccccgaaaaagaaaaaccgagagagcggcttctgcacttcggagccgaacatctctctaacaatgaattgctcgccatcctgctgcggacgggaacgaaacatgagtccgtcatgaacctcgctcaccggctgctgcggacgtttgacgggctgcgcctgttaaaaggcgcctctgcccaggagctttccagcattccgggaatcggaacggtgaaggccgttcagattcttgccgcaattgagctggggagccgcattcataagacatccgccggggagcattgcgtcatccgctctccggaagacggggcgaagtatgtgatggaggatatgcgctttttaacccaggagcattttgtctgtttatatttaaataccaaaaatcaagtcattcataaacgcaccgtttttatcggaagtctgaattcatctattgtccacccgcgggaggtgtttaaagaagctttcaaacgatccgccgcgtccttcatttgcgttcataatcatccttcaggagatcctacaccgagcagggaagatatagaggtaaccaggcggctttttgagtgcggaaatttaatcggcatcgagctgctggatcatttggtcattggtgataaaaaatttgtgagtttaaaggaaaaaggatatttgtaacactttttttttcgttgatttaagatataatagattttatgagtttttccctttagggtatttttgctttaagaaaggaagatacatacatatgttcggaattggtacaagagaccttggtatagatttgggaaccgcgaatacgcttgtgtttgttaaaggtaaaggaatcgtagtgagagagccgtctgtcgttgctctgcaaacggatacgaagtcaatcgttgcggtcggtaacgatgcgaaaaacatgatcggaagaactccgggcaacgtggttgcgctccgtccgatgaaagacggcgttatcgctgactatgaaacaactgcgacaatgatgaaatactacattaatcaggctgtgaaaaataaaggattgtttgcgagaaagccgtacgttatggtgtgtgtgccgtcaggtattacggccgttgaagaacgggcggtcatcgacgcgacaagacaagcgggcgcacgtgacgcttatccgattgaagaaccgtttgcggcagcaatcggtgcgaatcttccggtatgggagccgacgggcagcatggtcgttgatatcggcggcggaacaactgaagtggcgatcatttctttaggcggcattgtcacgtctcagtcaatccgcgtagccggtgacgaaatggacgactcaatcatcagctatatcagaaaaacatataatctgatgatcggtgaccgtacggcggaagccattaaaatggaaatcggttcagcagaaaccggtgaagaaaatgcgtcaatggaaatccgaggccgcgatcttctgacaggtctgccgaaaacgatcgaaatcacgggaacggaaattgcaaatgcactgcgtgatacagttctctcaatcgttgatgcggtgaagagcacgcttgaaaaaacaccgcctgagctggccgctgacattatggacagaggtattgtattaacagggggaggcgccctgctccgcaatctcgacaaagtcatcagcgacgaaacgaaaatgcctgttcttatcgctgaagatccgctggattgtgttgcgatcggcactggaaaagcactggagcacatccatcttttcaaaggaaaaacaagataatcaggagttaaatagaagaggtgtatcacgatgccgaacaaacggttaatgctattacttctgtgtattatcatattggtggctatgattggattctcgctgaagaacggccgtaataccacctggcctgaaaagctgatcggtgatacgacgggagtatttcaaaacatttttcacacgcctgccgaatattttgcagggttcttcggggacataaaagacctgaaaaacacgtacaaagaaaacgaacgcttaagacaaaagctggacggacagacacaatatgaagcgaagctccaagaactcaaagatgaaaacaagaagctgcgtgatgaactcgggcatgtcaaatcaatttccgactatgatccgattttagcgaccgttatcgccagaaaccctgatcaatggtacaagcagatcatgatcaataagggaacgaagcacaaagtggccaaagacatggctgtcacgaacgaaaagggtgcgctggtcgggaagatcaaaagcagcggactcaacagtttcacatccgccgttcagctgctgagcgatgttgaccgcaataacagagtggccaccaaaatctccggcaaaaagggaagcaaaggctacggtttaattgaagggtatgataaaaagaaacagaccctgaaaatgaccatccttgaaccggatgaaaaacgtgaagtgaaaaaaggcgacctcgtggagacctccggaacgggcggcgtatttcctcaagggctgacggtcggcgaagtgaccgatgtagaatcagatgcttacggcctgacgaaaatcgcttatgtgaaaccggctgccgacttgtacgatcttgaccatgtcatcgtcgtgaaccgaagcgtagcaacaggggaggaaggatcgtgaaacgtttccttctccctttgattatgattttggtcttttgtgcggaaagcatctataccgatctggtgcgttttcctttcgtttccgtcgagcagcaggtcgttccgcattttcttttgcttgcgctgatttttatgtcggcttatatcaaccaaaagcatgcggtgatctacggtttcattttcggatttctttatgacatcaattatacgggtgttttaggcgtttatatgtttggttttgccggattatgctatctggcggccaaagcgtttaaagtgctgcagacaaacgccctgatggtcattctggtcgcggtgctgagcgtatgtgtgcttgaattttacgtctacggcattcagacgttaatccgcagcggcactatgacgtttaacgattttgtcattcagcgattcttgccgaccgctttgctgaatatcgcgggagccgttatattagtcctgcccttcaggctgttttatataagtctgaagaaagaattaagagatgagtaaaaaggattttatctttttttgacgaaaagagtatgttgttgaggtgaacattgatgaagaccaaaaagcagcaatatgtaacaataaaaggaacaaaaaacggcttaacattgcatctggatgatgcgtgttcttttgatgagctcctcgatggtcttcaaaacatgctgtcgattgaacaatatactgatggcaaaggccaaaaaatcagtgttcatattaaactcgggcatcggtatctgtatcaggaacaggcagagcagctgactgatctgatcgcgtcaaagaaagatttagtcgtgcattcaattgacagtgaagtcatcgccaaagaagaagcgcagcggatgaaagaggagcaggaaattgtttcggtttccaaaatcgtccgttcgggccaggtgcttcacgtgacgggagatttgcttttaatcggagatgtgaatcccggcggtacgatcagagccggaggaaatatatttgttctcggttcattaaaagggattgcccacgcgggttataacggaaataaccgggctgtgatcgccgcatccgaaatgatgccgacacaattgaggatcaatcacgtgttaaatcgctccccagaccacattcaaaaagggaacgacatggaatgtgcttatttagatactgacggaaatatggtcattgaacgccttcagcaattggctcatttaagacctgatctaacaaggcttgagggaggaatgtgaaattgggtgaggctatcgtaataacttcgggaaaaggcggagtaggtaaaacaacaacatctgcaaacctcggtaccgccttagccattttagggaagcgcgtctgtttggtagacacagatatcggactgcgcaaccttgatgtcgtaatgggtcttgaaaacagaattatttacgacttagtagatgtaattgaaggccgatgcaagacgcatcaggcgcttgtcaaagacaaacgttttgatgatctgcttcatttaatgccggctgcccagacaagcgacaagacggctgttgtccctgagcagatcaaatcgcttgtgcaggagcttaagcaggaatttgattatgtcattattgattgtccggcgggaattgaacaaggctataaaaatgccgtctccggagctgataaggcgattgttgtgacgacgccggaaatatcagcggtgcgggacgctgaccgcattatcggacttttggagcaggaagatatcgaaccgccgcgccttatcgtgaaccgtatcagaaatcacctggtgaaaaacggtgacacgatggatgtggatgaggttgttcatcatctgtctattgatctcctcggaatcgttgctgacgatgatgaagtgatcagggcttcaaatatcggcgaaccgattgccatgaattccaaaaaccgcgccagcattgcgtaccgcaatatcgcccggcgcattttaggagaatccgttcctttgcaggtgcttgaagagcagcaaaaagggatgatggcgaaaatcaagtcatttttcggcgtgcgttcataatatataccagaatacaaagatctgatgaagcccagcttatcaggtcttttttgttttttaagagcgcatatttgcaatggacaagacataggatgtacaaacccaacgattgcaaaggatgatggcgatgagtcacagagctgatgaaattagaaaaagactggccaaaagaagaaaacagcggcctgaatcaaaacggactttcgttcaaaacgctcaaacgcagaattttcccgcgtggcagacggtcaaggagcaggaaaagcacaagcttcttccggactacgaatatcaaacggaacacccgcccgaatttaacgggcggcatccattgatcagcgctcattctattattttaaaatgcctgctggccgcctgtctcgtactgatctccgctattgcctataaaactgacaaacagccgctgagtcagatcaaaccggcaatcgcacaaacctttcaaaaagaatttcagtttgctgccgtaagcaattggttcgtatcttccttcggaaacccgctcgcttttcttacgccgggaacgaaaaagaaggacggtcaggtggcggtcagtcaggatatggccgttcctgccgcggggaaaatccagcaggactttcaaaataacggagagggcgtcgtcgtcgaaaccgccagtgaagccattgacagcgtaaaagaaggctacattatggaagtgagcaaagataaaaaaacagggctgacggtgaaggtgcagcacgccgacaatacaagcagcatttacggccggctgaaagatgttaacgtttcattgtacgattttgtcgataaagggaaaaagatcggttcgatcaagctcaacgataaaagtaaaggccagtactatttcgcgatccaggatggcgataaattcatagatccgatccaggtgatcacatttgatgaataaatggctcatcctcctttttaaaattcatgtccatccttttctttggattatcatggggctcggtcttatgacggggcacatcaaagcgctgctgtgtcttttgctggtcgtatccgttcatgagctggggcatgctgctctggctgtgtttttttcgtggcgcattaaacgcatctttctgctccctttcggcgggacggttgaggtggaggagcacggaaaccggccgcttaaagaggaattcgcggtcattttggcgggcccgcttcagcatgtgtggcttcaggcggcagcctggctctttttcacgtcaggttttgcaagtgagcagacatttgagatgtttaccttttataacctctccattcttttcatcaatcttttgccgatctggccgcttgacggcggcaagttcgtgtttttatacttctctaaacaaatggcttttcaaaaagcgcatctcctcagcctgcagacatcggccgtttccgcgcttttgctctgctgctggattgtgctggccgtcccccttcaggtcagcgcatgggtgctgttcgtctttctcgccgcttctttatgggatgaataccggaagcggcattatattcagctgaggtttcttttggagagatactacggcaaaaaccgcgatgtcgccatgctgcatcctttgacggtcgcggccgatgccaaagtaaagcatgtcatggctgaattcaaacggggatgcaagcaccccattatcattgaaaaagccggcgaaaagctcagccagctcgatgaaaatgaagtgcttcatgcgtattttgccgataaacggacagattcctctatggaagacctgctgctgccttactagaaatagattgacatatccttttggttctgatatattttttaatgttatggatgtagcaccaatgctacaaccgctcgggacaggtgataagagctttaaagccccctgttgctggcgagtcttagtctaataggaggtgcagagaatgtacgcaatcattaaaacaggcggaaaacaaatcaaagttgaagaaggtcaaactgtttacatcgaaaaacttgctgctgaagcaggtgaaacagtgacgtttgaagacgtattgtttgttggcggagacagcgtgaaagtcggcaacccaacagttgcaggcgcgacagttacagctaaagttgaaaaacaaggccgtgcgaaaaaaatcactgttttccgttacaagccaaagaaaaatgttcataaaaaacaaggtcatcgtcagccttatactaaattgacaatcgaaaaaatcaacgcgtaagcatgattgaggcaacaattcgaagatcccggaatgacgggggcattttgtcctttgaaatgacgggacatgccgattttgctgaacatggacgagatctcgtttgcgccggggtcacggctgtcgttttcggagcggtcaatgcggttatcgcgctggctcctctcgaaccgattcttgatataggcgaggacgggggttatttctattttgaattccctgaagccgctgatcaggaagctttgcaaaaagcgcagctgctgattgaaggcatgattgtttctcttgaaacgatcgagcgggattacagtgaacacttacggttgactgcaaaccaaatataggaggtgagttacatgcttagattagatcttcagtttttcgcttctaaaaaaggtgtaggttctacaaagaacggacgtgactctgaatctaaacgtttaggcgctaaacgtgcagacggtcaattcgtaacaggcggatctatcctttaccgtcaacgcggaacgaaaatctacccaggtgaaaacgtgggccgcggaggagatgacactctttttgctaaaatcgacggaactgttaaattcgaacgtttcggccgtgaccgcaaaaaagtgagcgtatatcctgtagctcaataatgacacaaaaaactccggtcgttgactggagttttttttgcagtaagcggagtaacatcaagaatgaaaagcagaggatgcgtgagtgaaccccgccttgaatgaggacatcagcttctcatacccactggatatgttccccaagcagtgataccaaaaatgtttctgcctggcatccgcattgtatgcgatccgaaaaaggaacatgatgaaccaggaaaaacaagtgtttttttaacaaagccttctctgttataattcatagtacacacttatcaagactcctaaaaagaaattaaacgattgggagtgcgaaaatgaaggatgtatcgaagaaacaagaagaacctgtaagcgatgcggctctgatcaatgaactgatccaattaatgggccatttccgtcatgattggatgaataagctgcagctgataaaaggaaacttaagtttgcagaagtatgacagggtcgttgaaataatcgacgaaatggtcatagatgcaaagcacgagtcaaagctctcaaacctgaaaaccccgcacttggcgtttgactttctgacatttaattggaagtcccgttatatgaggctcgaatacgaagtgctcggagaaattaaagatttatcggcatatgatcaaaagctgtcgaacctgatgagaaaactgtttcatctgttcggtctggcggtaagcaatgaaagtgaaaatcatctgaccgtatcgctgcagacggatcaccctgacagacagcttattgtatatctcgattttcatggaacgattgcaaatgcagatgtgtttgatgaatttcgcaaatcccggtatgaggactttgatgtcatgcaatttgagctgaccggccatgaatgtgtggccgaaattggaatgaactagcggttttttacggtttagaacggaggatattatgtttgtagatcaggtgaaagtatatgtaaaaggcggcgacggcggtaacggaatggttgcgttccgccgtgaaaaatatgtgccgaaaggcgggcctgccggcggtgacggaggtaatggaggcgacgtcgtttttgaggttgatgaaggactgcgcacgctcatggacttccggtaccagcgccatttcaaagcgatacgcggcgagcacggcatgtctaaaaaccagcacggcagaaatgcggacgatatggttgttaaagttccgcccggcacagtcgtaacggatgacgatacaaaacaggtcattgccgatctgacagagcacgggcagcgcgccgtcatcgcaaaaggcggacgcggcggacgcggaaatacccgctttgcgaccccggccaacccggcgccgcagctgtcagaacacggagagcccggaaaagagcgctatatcgtgcttgaactgaaagtgcttgcagacgtaggtctcgtcggcttcccgagcgtcggaaaatctacgcttctgtctgtcgtttcatcagcaaagccgaaaatcgccgattatcattttacgacgcttgttccgaatctgggcatggtggaaacggatgacggaagaagcttcgtcatggcggatctgcccggtttgattgaaggagcgcacgaaggagtcggcttaggccaccaatttctccgccatatcgaacggacgcgcgtcatcgttcacgtcattgacatgtcagcgatggaaggccgtgatccgtatgaggattatgtgaccattaatcaggagctcagtgaatataatctgcggctgacggagcgtccgcaaattatcgttgcgaataaaatggacatgcccgaagcggctgaaaatctaaaagcgtttaaagaaaagcttcaggatgaccatcctgtcttcccgatcagcgcggtgacgagagaaggactccgcgatcttctgtttgaagtcgccaaccagctggaaacaacgcctgaattcccgctgtatgatgaagaagaactggcggaaaaccgtgtaatgtacacgatggaagatgaagaaattccatttgacattacccgtgatccggacggcgcgtttgtgctttcaggtgacagtctggaacgtctctttaaaatgactgacttctcccgtgacgaatccgtcaagcgttttgcaagacagatgcgcggtatgggcgttgatgaagcgctcagagaacgcggtgctaaagacggcgatatcatccggctgctggaatttgaatttgaatttattgattaaaaagacggagagcttgcaatgcaggctctctgatgtaaaagggaggggtgcaggtgaaagaagagacattttatttagtgcgtgaagacgttctgcctgatgcgatgcggaaaacccttgaagtcaaaaagctgctcgacagaaaaaaggctgaatcggttgcagatgccgtgcagaaagttgatttaagcagaagcgctttttacaaataccgagatgcggttttccctttttacacgatggttaaagaacaaataatcacacttttctttcatttggaggatcggtcaggcgcgttatcccagcttttgcaggcggtggctgactcaggaagcaacgtgctttccattcaccagacgattccgcttcagggcagggcgaatgtcacgctctcaatcagtacgtccgcaatggaagaaaacattcatacgttaatgaataaactgagaaaatttgattttatagaaaaagttgagatcttagggtcaggcgcgtaaggagagaagagacatgaaagtcggttatttagggccagaagccacatttacacatctagcagtcagttcctgctttcaaaacagcgtgacacaagcaccttatcaaacaataccggcatgcatggatgcggcggttgcgggagaagttgatcttgcatttgttcctttggaaaacgcgctggagggctcggttaacttaacgattgactacttgattcatgagcagcctcttgcgatcgtgggggaaatgacgctgccgattcaccagcatctgctcgttcacccttcgagagaaaatgagtggaaaaagcttgagaaaatttattctcattcccatgcgattgcgcaatgtcacaaatttcttcaccggcatttttcgtccgttccttatgagtatgcgaagtcaacaggtgcggctgccaagtatgtcagtgagcattcggaccttccgatcggcgtgattgcaaatgaaatggcggccgctacatacggattgagcatcgtgaagcgggatattcaggattatcaggacaaccacacgagatttgtcattctttcgcctgaaaaagacgtctcattcgaagtgaatgcgaaactgtcttcacggccgaaaacgacgatgatggtaacgcttccccaagatgaccaatcaggcgcgctgcacagggtgctgtccgctttttcatggagaaacctgaatttatcaaagatcgaatcgcgcccgaccaaaacgggtctcggcaactatttctttattattgatattgaacaggcgatggatcaggttctcattcccggtgccgttcaagagatggaagccctcggctgccgggtcaagcttctgggaacatatcaatcctattcgatataaaaaaagctccccttcagggggctttttttttaatcttttattaaaatacccgcgtcgtccagcgcttgacaggcttggtcaatccgctcttttgtcggggcgcttaacgtatggagatgcacgcctccggtcagctgtgaaaggtaagcggcatttgtcgagttaatgtgatccatgaattgtttgacttctttccgtgtgctgactcttatggcggcggttaaatcgccgtatacggggtgttcaataatgacgtcctttatggtgacgccttcatcgacaatgagttcaagctcttcttccgtccgctccgggccgtgcagacaggcgacaatccgttcggcgtttttttcgccgccggcattcatgctgatgtataaatagccttggctcgtcgcgataatcggttcgctttttgctttcaagagcgatatgtcctgcacgatcacctgtcttgaaacatttgcttttttggccaattcgcctcctgttaatggcgagccggcttctttcagccaatgaagcagcatgtcgcgtcttttcgccccagtaagcttcgttccttctgtcaaattgctgattctcctttcttttgctcccatagcgccgtaaatgtatgtatcagcatatcgagctgttcacatgttgtttcgtttccgaatgagatccggaaaaactgccgcgcttcccgttcggtttttctcagcgccttcatagctgaagaagggccgtggctgccggcggaacatgcgctcccggttgagatgcaaatatcgttacgattacattctaacataatatattgtccttcaaaggagtgaaaaaaacacccgacaatgtggggcaggcattcaccgccggtttcttcctctgaaaatgaaatggggaggccttgacgcctaatttggtcatacaaataattcctcagcctgtcagcatgctcacggtgttcctccatatgtttcactgcatactccgcagcagcggtaaaagcgccgatggccggcacattcaccgtaccgggcctgaacccgttttcatgcacggtatgcggataaaccggattccagctgacacccggccgaatgtaaacagccccggtgcctttcgggccgtatactttatgaccggagacggaaagggcgtcgattcccgcctgatccgcatcaatcggcagtttgccgaaactttgaacacaatcgcaatgcagtaaaatgtttctctggtgaagaaaagcggccagacgattcacaggctggatgaggccggtttctgaattggcgtgctgtatggaaacgagccccgtgtcaggacggatatgagccgccagtatgtcctcggttataaggccgttttcgtcgggatatatgatggtgacatcaattccccggtcagctaaaaacgccgcggcattatggatcgagtggtgttccattgcggtcgtaataaaatgttttttatgatcgggcagaccgtacagcaatgattggacggccaagatgttcgcttccgttccgccgcttgtaaagtgaatgccgtctgccgctccgccgatcaattttcctgcagaatgtctgcaatattccagcacgtccgccgctcttcctccggcgtcatgaaggctgctagcattgccgtatacctctgtgctgagatgctgaaagactttcgcggcttctttgcttaaaggcgttcccgccgcgtaatcaagataaatcatacagcccgtctcctatccgtttatgttaaaaaaagcttgagtttattttatcgttgtgtaaatataggtgtcaagacaggtgtaaatataatgggagggtgatgtatgtctgaaaaaacaattatcgtcattggtacggggacggcggcccttgcctgtgcttcctcatttcctccgtcataccaagtaaccgtcatcacaaagagaaacgtaacgaacagcaattcgtattatgctcaaggcgggattgctgtttcatacgcaaaagatgactcgatagaatcccatgtgaacgatacactgtatgcgggatgcggacacaatgacgtgacagccgtgcggcatttgctgcaaagcggacagagcatgataaacaggctgatagaaggccttttcccttttgatacgaagtcggacggaacgttttgtctcggcagggaaggcgctcattccaaaaggaggattctgcacgccgggggagatgcgaccggacggatgctggttgagtttctggttcggcagctgagggacggcattcggatcattgaacacgagacggttgttgatctgctgattgaacacgggcgatgcgcaggcgttgccgtaaaggatgcttcaggtgccgtttcttacagaagagcggattgtgtagtgcttgcttcaggcggctgcggcagtctgtaccaatatcacacaaatgattccgccataacgggagacggcatcgctcttgccttccgcgcgggagctgagatcacggatatggagttcacccagttccacccgaccctccttgtgaaaaacgggactgtttacggtctgatttctgaagcagtgagaggagaaggcggatatttagcagatcgcttcgggcgcaggatcatggctggcagacacgcgcttgaggatttggcgccccgggatgtggtttcacgggcgatttatgaagaaatgatgaaagaaaatcctgtttttataaattgcagccgaatagccgattttaacaaacgttttccgaccataacagaaatttgtcaaacagccggcgttgatcttgaaagcgggatccccatagcacccggaatgcattttttaatgggcggagtaaaagccgatacatgggggaaaacgtccgtgcctgatttgtacgccataggcgagaccgcctgcacaggcttgcacggggcgaaccgccttgcgagcaactcactgctggaagcgctggcaagcgggcaacgatgtgctgaacatatcattcaaacaccgttaaacggaagatataaaaaaaccccgaagaaaactgatgtcatcttacaagtgccggacacaacgattcatgtgcttcaagccaaaatgacaaccggagcgggtatcgtcagggaaaaagaaaacctgcaggcgctgacatcctggcttaacaacgtatctgtgcatcatataaatgtgaaggatatcacaatggaacaagcagagctatcctgcctatggaagactgcgcaacttgttgtcacctcagcccttattcgggaagaaagcagaggcgctcattttcgtactgattttcccgggacggagaaagattggcacggaaaacaaatcattcattcaacatctggaacggttatcagaaaaaacgaaaggattggggaactatggacattctgcagctgaaacaaatgctgactcatttttttcaggaagatatcggaacgggtgatgcgacgtcacaagcgattttttctgatcagcaatgtaaagcgcggatcatcgcaaaaacagacggcgtgtttgccggagaagacgttatccgtgaaggatggaagcttttacacgatgatatccgcatccgccctctgaaaaaagacggagaacggatgaaaaaaggagatgtgctcgctgaaatggaaggccgggcggcagctcttcttactggggagcgggtcattctgaatctcatacaaagaatgtcaggcattgcgacaatgacggacgaggctaaaaggcgtcttgatgatccgtccattaagctttgtgatacgagaaaaacgacaccggggctcagaatgctggaaaaatacgccgttcgggtcggaggcggctttaatcatcgcttcggcttatatgacggcatcatgattaaagataatcatattgccgcctgcggatcgataaaggcggccgtggagcgggcaagagaaacggcagggcagatgcttgcggtggaagtcgagatcgaatccgaacagcagctgctcgaggcaatagaagcgggcgcagacattattatgtttgacaactgtccgcctgagtccgtccggcgttttgcaggcatgacaccgggccatatcaaaacggaagcatccggaggcataacgctcgacacattgcccgcttataaagggacgggcgtccaatatatttcactcggatttctgactcattcagtaaaaagcgccgacatcagcatggatgttgaggctgcggaacagggggatttttaagatgtctatttttgacgtgttaactgcatcagccgaaatgatgccgagccattataaagacatgagcaccggagaaatggaaaagcgtgtcgccgccattaaacgggatttcggaaagcgcctgttcattccggggcatcactatcaaaaagacgaagtgatacaattcgccgatacggcaggtgactccctgcagcttgctcaagtggcagaaaaaaataaagaggcggaatatattgtgttttgcggcgtgcattttatggcggaaaccgctgatatgctgactgatgataaccaaaccgtcatattgcccgacatgcgcgccggatgctcgatggctgatatggcagatattcagcagacggacaaagcatggcaagagcttcaagaactgtacggtaacaccatcattccgttaacatatgttaactcgacggcggaaattaaagcattcgtcggtcggcacggtggagcgaccgtcacctcttcgaatgcccggagtgtgctgaaatgggcttttaaacaaaaagaaagaattttatttttgccggatcagcatttaggcagaaatacagcctatgacctcggcattccgctgacagaaatggctgtatgggacccggggcagaaccgattgcttactgaccatccggaaaacattaaagtcatcctttggaaaggacattgctccgtacacgaaaagtttacagcggaaaatatttttcagctgcggcagcgggattccggcatccgcattatcgttcatccggaatgttcgcgggaagtggtctcgctcagtgacgacagcgggtctaccaaatatattattgatacgattgaacaggcagaaccgggaagcaagtgggcgatcggcacggaaatgaatcttgttcagcgcctcattcactcgcacccggataaacagattgaatcattgaatcccgatatgtgtccgtgtctgacaatgaacagaatcgacctgccgcatttattgtggtcgcttgagcagcttgaaaaaggcgagccgaagggtgtcattaaagttccggaagcggttcggacagaagcgcttcgtgctttgaacagaatgctgagtcatacgtaatcataaaaatttcccctccttcccaaattttttatcatcatgcccagtccaccggcatatagtgtgaagaaacgtattgtaatgacaaatgtaccgttcacgttttgtgcataggaggggaaaacgttgaaaattcatatcgttcaaaaaggcgattcgctctggaaaatagctgaaaaatacggagttgatcttgaagagttaaaaaaactgaatcatcagcttagcaatccagacttaattatgcctggaatgaagataaaggtgccttcagaagccgttccggtcagaaaagaacccaaggccggcttcggaacgtctgcgcataagcatgagcatccatatgccaaagaaaaaccgaaatcagttgtggacattgaagacaccataccggaagaaccgaagccgtcaattccgtatgtgccgccaatccctgaaaagcatgaaaatgtgctgccggaagctgatatgaaccaatattatccgtccaatcagctgtttcagccgtggtcgcctcctaagccggaggaaccggtgacacattttgtcgagccgaaagaaaaagagcatgacaataacattccacaacaggaggaaatgatcaacatggaaaacgcgaattacccgaatatgccgaaggcgcctgaagccggaaagatggaagaagaaaacgccgcttatcatctgccgaacatgccaaacattccgaatgtcccgtttccgaatatgccggccgttgaaccgccttttatgcattacccgatgccgtgcatgccttgtccttgtccggttccggtgacaccgatgctgccgggttcgggactatgccatccgtgcttcccggtaggcggaggtttcggcggttttggaggaggttatggaggctttccggtaatgccgatgccgttaccgtacggattccatcatcacggattccatcatccgggatttgggccgcaagcgggttacggtgaatatgaaaaccaggcccatgaaaatgcagagcattatgatggttctgcatccggtttcggcggtgctccgtacggtcaaatgccgtattacggcggatattcgtctcattacgcaaacgcgcctcatcatgatgggaaatttaaggatgatgattgcggctgccatgattcacatcaccaccaccatcatcaccacggttcacatcaccatcacgcaaatatgcctgtgcagccgtatccgaatgtgggtgcaaacgccggatattttatgccttacggcggagcaaatcctaatgccgcaccgaatcagccgagtccaaatcaagtattcggacggccggaggaagaagaagattaatgtttcgggacgatgtatgtcgttcctttttttatgtccaactgaggaatggacataactgacaagcttaaacccgccgtcggccgcacatcctaaacatgagcggaaaacgctcaaacagcgatgaatccacgggggtttttccattgggtaaaaaactgatgacgatcgcaggcgttttagccgtgacggcaagcttaacggcatgcggagcaaataatgccatgaatgacggacgctacaatcagtcaacacgtccggtcggatattattcgaatgataatgataacggcagacgccagtacggaatggaccatcaaggacccgtttctgaaatgatggaaaaccgaaacggccgtcataatacgacaaacgtgtctgaccagtatgcgcctaatgacggggttccgttaacgacggacggcacatataacggccgaaatgtcaatacgccgccggcagctatgtcttataatgggtatgacaacgccgaaaacatcaggctggcggcaaaagttgcaaaccgcgtgaaaaaagtaaaaggcgtacaggatagtcaggtcatcgtgactgacacgagagtcgtcattgctgtcagaacaaatcatccttttacgaaaaatgatgataaacatgtcaaacatgcggccaaaagatttgcggacggccgtacaattcaagtgtttaccgacaacgctacttttacaaagctgcaagacatgaacagaaacagccgttaaacgggactgccggatgatttcatccggcagtatttttatggataaagcttcatcatttctttacatattcttaaaacgctctttatgttgcggtgttaacataaaagtaataaaacgtaacggaggggccggaatgaaaaaaacggagcatgacaaaagccgcggagaaaaaactgtgtatctgaccgtaaggggataccggctcaaactgacgtccggacaaatgaaactgatttcagccggccgggcataatcatcggggcagccttcataatagaggctgcttttattcggctgaaacagacaaatgaaagaaaacggttaagcaccggcatctttggtcaaactagcatcaagagtttgattgaataaagaggtgttattggtgaaacgaatttgcggtgctcgtctattgtttatgcttatcttatcggctgcagtcctgatttgcggaggaaaaggcgcatacggggcggaggttgagcattacgggccgcttcgggtgcacgtccagctggaaaaggtctatctggacggtgatgtcggcatcgaacatacggatgaaaccgttttggcgatggaggatttttgggccgcatatgcgggctggacgctcgttgagcagaaaaaaggcttcgttcttttccgtaagcatgttgatgacatttctccgctcagtaaggttaacggttatatcggcgtcacggacggaggcgtcatctccacttttcacggccgtcccggatcgctggccgagccgatccaatctttcttccagattgatatagaaaggctggaaagccgattgcaaaagcacttggaacacggcataccgtacaggacaaaagcggagtttgagagcgtgatcgatcatattaagacttacagcggatgactttgacgcaagacatgtgacacatgtcttttttttctgaatggaagatgtcaaagcgaacatacgttaacttttctataagactttggctgtttttgtgttacaatgataagcagtcaaagaggtgaataggtgtgattgaattcgtgaaggggacgattgattatgtatctccccaatacatcgtgattgaaaacggcggaatcggctatcaggtcttcactccgaacccgtttatttataaggtaagcaatcaagagaccatttttacgtatcatcatataaaagaagacgccttttctttgtacggtttttcaacccgggaagaaaaagcgcttttcacaaagctgctgaacgtcaccggcatcgggccgaaaggggcgctcgccatcctcggttccggtgaccccggagccgtcatcgaagcgatcgaacaggaagatgaagcctttttggtgaaatttccgggtgtgggcaaaaaaacggcgcggcagattattcttgatttgaaaggcaaactggccgacgtcgtgcctgaaatgattgacaacctgttcaatcatgaagcgcgcattgaaaaacaagaggctgaaacggcgcttgacgaggcgcttgaagcgcttagggttctcggctacgccgaaaaagaaattaaaaaagtgcttcctcacttaaaagaggaaacggcgctttcaacagatcaatatgtgaaaaaagcattgcaaaaattattaaagtaaggtgatgttcatggatgaacggctcgtttcaagtgaagcagacagccatgaatcaataatcgagcaaagcctcaggccgcagaatctcgcccagtatatcggccaaaagaaggtgaaagaaaatctgcgcgtgtttatcgatgcggcgaaaatgaggcaggaaacgctggaccacgttcttttatacgggcctccgggtctcgggaaaacaacgcttgcgtctatcgtggccaatgagatgggggtggagatgcggacgacgtcaggtcccgccatcgaaagaccgggagatttggcagccatcttgacggcgctcgaaccaggggatgtgctgtttatagacgaaattcacaggctgaaccgctcgattgaggaagtgctgtacccggcgatggaggatttctgccttgatatcgtcattggaaaaggcccgtccgcccgctccgtccgtctcgaccttcccccttttacgcttgtaggagcgacgacaagggtcggattattgaccgcaccgctcagagaccggttcggggtgctgtcgcgtcttgaatactatacgcaggaagagctgacagatatcgtgtcaagaacggctgacgtttttgaagtggatatcgaagaagctccggctctggagatcgccagacggtcaaggggaacgccgcgggttgcaaaccggcttctcagaagggtgagagattttgcccaggtgctcggcgacagccgcatcacggaagaaatcgctcacgacgcgctcgaacgtcttcaagtcgatgcgctcggccttgaccatatcgaccataagctgctgatgggcatgatcgaaaaattcagcggaggtcccgtcggccttgatacgatttccgcgacaatcggcgaagaaccgcatacaatagaggatgtgtacgaaccgtatctgctgcagatcggatttctccagaggacgccgaggggacgggtcgtgactccggctgtgtatgaacattttcgattggaggcgcccgcccgtgactgactttccgaaggttctcatggttctcggtgccgttttgcttattgccggcgcagtctggcactttgtcggaaggctgcccggagatattttcgttaagaagggaaatgttacatttttctttcccgttgtcacttgtattgtgatcagtgtgatactatccattctgcttaattttttcggcagaatgaaataacaatagacagaataaaggtgaaatgatgaaagtcgatttatttgattttgaactgcctgaacgcctcattgcccaagtgccgctgaaagaacgtgacgcatcgcggctgatggtgctcgacaaacagacgggcgggctgacggacagttcatttaaagagattgtaagcttttttaatgaaggggattgtctcgtcttgaacaatacccgtgtgctgcctgcaagattattcggcacaaaagaagatacgggagcgaaagtggagcttctgttattaaaacaggaagaaaatgatacatgggaaacgctcgtaaagccggcgaaacgcgtaaaaaaaggaacggtcctgacatttggcgacggccggctgacagcggtctgcacggaggagcttgatcacggaggcagaaaaatagaattccggtatgacgggattttttacgaagtgcttgaatcactcggtgaaatgccgctgcctccttatattaaagagcagcttgatgataaagaacggtatcagaccgtcttttcaaaagaaatcggatctgccgcagctccgacggccggacttcattttacggaagagattctggacgagctgaagcaaaagggtgtgcggattgaatttatcacacttcatgtgggactcggcacattccgcccggtcagtgcggatgatgtggaagagcataacatgcacgcggaattttatgaaatgacggaagaaaccgccgcctctttaaacgaggtcagaaaggcgggagggcgcatcgtgtcggtcgggacgacatcaacgcgcaccctggaaaccattgccggcgagcatgacggcgtatttaccgcttcaagcggctggacgtccatattcatttatccgggatatgaatttatagcgattgacggcatgatcaccaattttcatctgccgaaatcttcccttatcatgctcgtttctgcgcttgccggcagagagcatgttctttccgcctaccgtcatgcggtagaagaggaataccgtttcttcagctttggcgacgccatgctgattatctaatttgaagacaggaggcctcatacaaagtggctgaacaaccgatacgttatgaatttataaaggaatgcaaacaaacgggagcgcggctgggcagagttcatacgccccacggctcctttgagacgcctgtatttatgccggtcggcacgcttgctacggtaaagacgatgtctccggatgagctgaaatctatggatgcgggcattattttaagcaatacgtaccatttatggctccgcccgggacacgacattgtaaaagaagcgggcgggcttcataagtttatgaactgggaccgcgcgattttaacagattccggcggttttcaggtcttttcattgagcaagtttcgtaatatagaagaagaaggcgttcatttccgcaatcacttaaacggagacaagctgtttttatctccggaaaaagcgatggaaattcaaaacgccctcggctctgatatcatgatggcgtttgatgagtgtccgccgtatccggcagagtatgattacatgaaacgctctgtggaacggaccagccgctgggcggaacgctgcctggaggcgcacgggcgctcagatgagcaggggctgttcggaatcgtacagggcggagaatacgaagacctgcggacacaaagtgcaaaagacttggtttcgcttgattttccggggtatgccataggcggattatctgtcggcgagccgaagcacgtcatgaaccgagtgcttgagtttacaaccccgcttttaccgaaggacaagccgagatatttaatgggtgtgggttcaccggatgccttaattgacggcgccatccgcggcgtggatatgtttgactgcgtactgccgacccggattgcccgaaacggcacggtgtttacgaatgaagggcgtctgaatatgaaaaacgccaaatatgagcgtgatttccgtccgattgacgaagagtgcagctgccatacatgccaaaattactcccgcgcttacatcagacatttgatccgctgtaatgaaacgtttggaattcgattaacaacttaccataaccttcattttctgttacacttaatggagcaggtcagacaagccatccgggaggatcgtcttggtgatttccgagaagagttctttgagcgttacggctataataagccaaatgcgaaaagcttctaaataaaaccattcatgaaaggagggaaacagatgggtactttaggcacaatcgttcctattattttaatgtttgcagtgctttatttcctgctcatccgtccgcagcaaaagcagcagaaggccgtccgccagatgcaggaagagctgaaaaaaggggattcagtggtgacaatcggaggattgcacggcactgttgattcaattgatgaaagcaaggtcgtcattaaaacaggtgataacacccgtttaacatttgaccgccgcgcaatcagagaagcttccgctgaataacagcgaagctcatacatacaaaaaaagagcggagaatccgctctttttttattacgctgatctgcttcctttcaaattcactccgaaaatgccgcccagcatactgactcccaaaaagccgagatgaaacaaaagctgaccggatgtaaacgtttttccgaaccctaaatattgaaaaagcaagatgattaatgaaaaacagacggcggttaacgctccgatcatccagcctttttccttcgctttgccgcccgatataaaacctcccgcaaataaagaaagaaaagaaagcgcggtgatcagccagctgaaagatgattcttccattgaggtgactgtcagtaaaagcgaaatcgccaaactcgtaagaagcatcaccgcaaaaatagccactaagccgtacaaaacgcctcttcccacttgtttcgtttcttccatttttatctcctctccgctctgcggcctgatatatgacaagccggagcccgtctttttctaaatgtattctctgaatgttcgaattagacgtaaatgcatgatgttcagcccgtttcttacataattcagagccgatggcaaatgctatgaccgttggaggtgcgatatggaagatattttcattattacgtttcgtacgattgtgctttattttatcattcttgtgattttcagactgatgggaaaacgggaaatcggagaactgagcattttagaccttgtcgtctccattatgattgccgagattgccgtattggcaattgaaaatgtaaaagataagcttttgcatacaattgtgccgattgtcgttttaatgattattcaagtaagccttgcttttatttcgctcaaaagccaaaaaatacggcagctgcttgacggaaaacccaccattattataaaacagggaaaaattgatgaacgggcgatgagatcgcagcgctacaattttgacgatcttcttatgcagctgagggagaataacatcgatagaatctctgacgtatcgtatgccattttggagtcttcgggcaaactgtcaatcgtcaaaaagaaaaacaataaggataagcagatggaaacatcgcttatcgttgacggggtcattcagaacgagcatctggacagaatcgggaaagataaacactggcttgaaaaaaatttagcaaaaagaggatatcgcgatctttcggttatatcattctgcacgtttacggacggcgctttttttattgatctcaaagatgaaaaaggggagccataaatcggcttcaccgcgtcacgaacttgccgatgaccggaatccggatcagctcttcccttttaatcagcctgaataacagcagcagcgcaatgtacaaaatcgcggtcattgcaatccagcctgtgagattaacagcctctgatcctgaaaaatgaacggtgtgcttgatgatgcggctgacataaccgcaaatgaatatgacggcaaaacagagcgcgtattcttttattttaatgctgatcggaagcaccttgcttacggtggccgcatgcagcagggtgacaaggaccatccccgttacaatcgcaagtgcggcgcccatgatgcctaaggaaggcctggtcgccaaaacaaaaattaggccggttttgacagcggcgccgataaaactgttcatcatggcggccccggctaaattgagagcctgcagcaccgcctgaagaggcccctgaaaatagtaaagcagaaaaaacggcgccatcactttaacaaataccgccgcattagttgatccgtacatgacggacatcagttcatcagcgaaagagaataaaataaccaccgaaatgcctccgcttaaaagacacagcctcatcgcctgttccagacggtattctacaacttgcagctttttttgctccattccttcactgatcgcaggaacaagcgccgttgacagagaataggttataaagctgggcagcgtcaaaaccgtcatggcaaatccggtcagctccccgtactggctggtggcggcagcggtggccactcctgcaatcgcaaggctctgcgcgacgacaataggttcaaaaaaccaagataaatttccgatgaagcggcttccggttgtcgggagcgacacgctcatcagctggcggaaggtttcttttccatttgcaatcgacttgaaaaattgttttctgattctgattgttttatttgctttaaaacaaatgaataaataaataagagaggcaagctccccgatgacagacgaaatcatggctcctgctgcggcatattcaatcccgtacggcagaaacaccgtcgtgcagactgcgacaagtgaaatccgcacgatctgctcaagcacttgggaaaacgccagcgggttcatattctgcctgccctgaaagtaaccgcgcagcacgctggatatcgcgataatcggcacgacgggcgtaatcgccagaagcgggaaaaccgtgcgctgatccgtcagcatcgtttctgacataatcggcgcaaagcataaaaacagcggcgtgaagatgagacttaatatcccggtgacggtaagcgccatcactaaaatgtgtttcattttctgccggtccccccgcgcgcttgcttcagcgacaagtttgctgatggcaacggggaggccgaattgagtcaaagtggtggccaagaaaaatgtcggggcagccatcatgtataaaccgaccccttcttcaccgataaaccgggcgataaccacccggttgacaaagccgagcattctcgtaatcatcccggctgcaatgagaataagagtgccccttaaaaaagtctgttttgccattttataaacccctgccttctcaaactacctggaatcatatacaataaagatatgcgccgatgtcgtccgagcatgacaagtcttcgagaaaaatggaaaaaggagcgagcgcccagtggagaaacatcccgccgaaatgtacaaagatcatttgcggcctttcttgtacagtaaacttgaagagttcaaaatccttggatacgatgatgttgagcacgagagtttatggtcatacttaatacataaaaagtggaaacagaaaaaggaattgccgctgcatgaattggccggtaatattttatcagttaaaattggcgattttatgaactatgcaaccgttgaagcttttaagtcgtctaattggctggaaagcgatgagggtcaggaagctttggatgaactgctgagataatgatttgacggcataggtttaaggaggaaatacataatgaaaaaaggacgcttgattgcgtttttcctgatcgtattattgatcggcacagggctggggtattttacaaaaccggctgccaataatattacgttaggattggatttacgcggcgggtttgaagttctgtacgatgtgcagcccgtcaaaaaaggcgataaaatcacaaaagacgtgctcgtcagcacggtgcaggcgctgaaccgccgggctaacgttctcggcgtaagcgagccgaacattcagattgaaggaaataaccgcatacgcgttcagctggcgggcgtcacgaatcagaacagggcgcgcgaaattctgtcaacggaagcgcagctctcgttcagggatacgaatgataaagagctgttaaacggctctgatctcgtggaaaacggcgcgaagcaaacctttgatccgacgacgaacgaaccgattgtcagcgttaagctgaaggatgcggataagttcggagaagtgacgaaaaaagtcaagaaaatggcccctaataatcagcttgtgatctggcttgattaccaaaagggcgattcatttaaaaaagaagtcggcaaaaaacatccgaaatatgtatccgctccgaatgtgagccaggaattaaacacgaaggatgtcacgattgaaggtcagttcaccgttcaaaaagcgaaggacttggccaatattttaaacgcgggtgcgctgcctgtgaaactgaccgaaaaatactctacttcagtaggggcgcaattcggacagcaggctttgcatgatacggtagaggccggcatcatcggtattgcaattgttttcttatttatgctgctttattacagactgcctggactcatagcggtcattacgctttctgtatacgtgtatattacgcttcaagtgtttgactggatgcaggcggtgctgacgcttccgggtattgcggcgctcattttgggtgtcgggatggcggttgacgccaacatcatcacctatgaacggataaaagaagaactgaaactcggcaaatccgtccgctcagctttccgttcagggaacagacggtcatttgcgacgatctttgatgcgaacatcacaacgatcatcgcagcggtcgtgctctttattttcgggacaagctctgtaaaagggtttgcgacgatgctgattttgtcaatactgacaagctttattacagctgtcttcctttcaagattcctgctcgcccttcttgtggaaagcagatggcttgaccggaaaaaaagctggttcggcgtcaagaaaaaacatattatggacattcaaaaaacagatgaaaatactgaaccgcatacggcattccagaaatgggatttcacgagcaaacgaaaatatttctttattttctcaagcgctgtaaccattgcgggaattatcatcttactggtctttaaactcaacctgggaatcgattttgcaagcggtgcgcggattgacgtgcagagcaatcatgcattgacggcgcagcaggttgaaaaagactttgactctctcggcatggatccggaaaacatcgtactctcgggtaaagagaaccatgttgccgcggcccggtttgtcggagagccatccaaagaaaaaatcgctgaaatcaaaacgtactttaaggacaaatacggatctgaaccgaacgtcagcacggtatcgccgacagtcggaaaagaactggcccgtaatgctttatatgccgtggcaattgcatcaatcggcatcattatttacgtgtcaatccgtttcgagtacagaatggcaatcgccgcgattgtatccctgctgtatgacgctttctttatcgtcgcgtttttcagcattacaaggctggaggttgacgtaacctttatcgccgctattctcaccataatcggttactcgataaatgatacgatcgttacatttgaccggatacgcgagcagatgaaaaaacgcaagccgaagtcatttgccgatctggaacatatcgtgaatctgagtttgcagcaaacctttacacgttcgatcaatacggtcttgaccgttgtgattgtggtcgtcgtgctgctcattttgggctcatcgtcaattacaaacttctccgtcgctttattggtcggtttattgacgggcgtttattcctctctttacatcgccgcgcagctgtggcttgtatggaaaggaaaagaatttaaagggaaaaaatcaatcgaagagtaaaaggaaacaggctgtcttccggaaggcagcctgttttttttaggccgcattgaacttaaaacctgcatttgctataatgacatacgcttacataatcaatcatcattgttaaaacatgtagggggttcttatgaacgttcgtgagtcggagcttccgggcatcggccagaaagtagaagtcattacgaaaaatcacgataaaatcagtattattcttcatgatgacggcagaaaagagctctattacttcgatgagaatgattatgacgaatgcttggcatccgttgaatttaacgacgaagaggcgaggcagatttccgctattttaggcgggatgacgtataagccgaaagcgctggaatctgtggaagtcgcgcttgatgacctcgtcattgagtggtttaaagccgaatctcatgcaccggctgtcagccgcacaatcggagatttggagatcaagaaacattacaacgtccagattattgcgatcgtgaagaaaaaccggcaaaaacagctgagccccggcattgataccgtaattgaagaaggggacaccctcgttatatcgggagaaagaagcggactgaaaaagctggtccgcgagcaattaacggcccggatttcctgagaccggggtttactcccgggaaaatgggggaaaagataagaatcaataattgggggcagacgcatgaataaacaatggactattatattcgctttactatttactctgattgtcgccatctttgctgtcattaacgtgcgggcggttgaggttgattatctgttcggaaccgctgaatggccgctgattttagtcattttaggctctgtgttaatgggagcgctgatcgtgttttcagccggtatatttcaagtgatgaaactgaagcgcgaaattaaaatgctgcggaaagaaaacagatccgcaggtgaattgacggctgattcggacggcaaaaaaacagccgcgccgccggaagaaatgcttgaagagaaaaaaggatcagaataacatttgaaacccctcagtccgctctagtataatagggtggttgaggggtgaatttatgttagcgtcaaaaatgcgctgggaaatccagcagccggatcaggaaaaagtcaaatcactcacagaacaattggacataacacctcttgtggcatcactgcttgtaaaaagaggttttgatactgccgaaagcgcaaggctgtttttacatacaaaggatgcagacttttatgacccgtatgaattaaagggaatgcgggaagcagttgatcggataaaactggcggtttctcaaggggaaccgattatgatttacggagattacgatgcagacggcgttacaagcacgtcagtgatgctgacggcactcagacagctgtcggcggacgttgacttttatattcccgaccgttttacagaaggctacggcccgaatgaacaagctttccgttccataaaagagcggggattttcgctgatcattacagtggatacgggaatcgccgccgtccatgaagctgaagtcgcaaaagagctgggcttagacgtcattattaccgaccaccatgagccgggacccgagcttcctgacgtatttgcgatcatccacccgaagcagccgggatgcggctatccgtttaaagaattggccggcgtcggtgtggcgtttaagcttgcccacgcgcttacgggttctttgccggaagctatgctggacttggcggcaatcggtacggttgcagatctggtgcctcttcatgatgaaaacagattaattgcgtcactcggaattgaaaggcttcgtacgacaaatcggccgggcctcaaagctctgattaagctttccggcggagatatcggacaagctgatgaggaaacgatcggatttcaggtcgcaccgaggcttaatgccgtcggaagaatagaacaggccgatcccgctgtgcacctgctgatgaccgaagatcagtttgaagcggaggaactggcttcggatattgaccggctgaataaagagcggcagaaaatggtgaaaaccatgaccgaagaggctgttgaaatggtacagcagcaaggcggaaacccgtctgccattgtagtggcaaaagccggctggaatccgggtgtcgtcggtattgtcgcatcgaagctggctgaacgtttttaccggcccgctgttgtgcttgggatagatgaggagcagggaatcgccaaagggtcggcgcgaagcatcagaggcttcaacctttttacgagcctttcacagtgcagagacattcttcctcatttcggcgggcatccgatggcggccggaatgacgctgaaggctgaagatgtggcggaattaagggacaggctgaatcaaatggctgaagaaacccttacggaagaggattttattcccgttcaggaggttgatcttgtctgcggcgttgaagacataaccgttgaaagcattacagaattgaatatgctgtcgccgttcggcatgcttaaccctaaaccgcatgtgatggtgaaaaatgccgtgcttgatgatgtgcgcctgatcggagcgaataaaaaccacgtgaaaatgacggtgaaaagtgattccgccgtccttgactgcgtcggctttaacaaaggagagctggaagccggagttgttcccggatcaacgatttccattgtcggcgagatgtccattaatgaatggaacaacagaaagaagccccagctgatgattaaagatgctgcggtgccggaatggcagctttttgatattcgaggcaagcggacgtgggaagatacggtcaccgcactgccgaaggaaaaacgggtgctcatcagctttaacgaaaaaaccgctcagaagctccgtgaaaaagagctgacgggcgagcttgccgagatcacttcggaatccgaggcggaagctctccagcttgacggaaaatatgccgtttttctggatgtgccgccgtcagcggatcgcctgcagcatttgcttgacggaaagaagccggaacggatttattttgtttttatcaatcatgaagaacatttcctgtcctcatttccatcgcggaatgatttcaagtggttttacgcatttctcttgaaaaggggcgcttttgacttcggcaagcatggttcagagcttgcgagacacagaggatggtcaattgacacaatcaatttcatgacaaaggtgttttttgatctcggttttgttaaaatagaagatggtgtgctgtctgtcgtgagcggtgcgaaaaaacgcgacctggcagattcgcaaacctatcaggtaaaacagcagctgatggaattagaccagaagctcaattattccgcagcccatgagctgaaggaatggctgaataagctgatgaaccaaggttcagaggcttatgaaagtacgaggaggacatagaacagatggatcttaaaaaatacgtaacaattgtgcccgattacccgaaagaaggcgtacaatttaaagatattacgacattgatggacaaaggcgacgtataccgttacgccactgaccaaattgttgaatatgcaaaagaaaaagaaattgatttagttgtcgggcctgaagcgcgcggctttattatcggctgtccggttgcatacgcactcggagtcggctttgcgccggttcggaaagaaggaaaacttccgcgtgaggtcattaaagtcgattacggtttggagtacggaaaagacgtactgacgattcataaagatgcgatcctgccgggacagcgtgtgctgattactgatgacttgcttgcaacaggcggcacgatcgaagcaacgattaagctagtcgaagaactgggcggcgtcgtagccggtattgcgttcttaatcgagctttcttaccttgacggcagagacaagcttgacgattatgatattttaacattaatgaaatattaaccgcatatggaaaaaagcactcgtgtcagggtgcttttttcctattatttcatcatcctgacagattctttaggtgttttgaacttctgccctttacatctctcgtttttttcttgataataaactaatacagtttacatttaaaaaaggtgattccatggcgaacgaacaagtattgactgccgagcaagtaatagataaagcgcgcacttatctgccggaggagcagattgcgtttgttgagaaagcttacctgtatgcgcaaaacgcgcatcgcgaacagtaccgcaaatcaggtgagccgtacatcattcatccgattcaggtggcggggatcctcgtcgatttggaaatggacccttccacaattgcgggcggatttctgcatgatgtggtggaggacacggatgtcaccctcgacgacctgaaggaagtattttctgaagaagtggcgatgcttgtcgacggcgtgacgaagctcggtaaaattaagtataaatctcaagaggagcagcaggcggaaaaccatcgaaaaatgtttgtcgctatggctcaggatatcagagtcatattgatcaagctggcggatcgccttcacaatatgcggacgttaaagcatcttccgcaggaaaagcagcggagaatttcaaatgagacgttggagattttcgctccgctggcccatcggctcgggatttctaagatcaaatgggagctggaagacaccgctctccgttatttgaatcctcagcaatattacagaatcgtcaacctcatgaagaaaaagcgcgcggaacgcgaactttatgtcgaagaggttgtcaatgaagtgaaaaaacgcgttgaagaagtgaatattaaagcggacttttcaggacgtccgaagcacatctacagcatttaccgcaagatggcgctgcaaaataaacagttcaatgaaatatatgatctgctcgccgtccgtattcttgtcggaagcattaaagactgctacgccgtactcggcattattcatacgtgctggaagccgatgcctggcagattcaaagattatattgcgatgcctaagccgaatatgtatcagtctctgcatacgaccgtaatcgggcctaaaggcgatccgctggaagtgcagatcagaacgtttgagatgcatgagatcgctgaatacggggtggccgcacactgggcttataaagaaggcaaggctgcaaacgaagaagcgacatttgagaaaaaactgtcctggttccgtgaaattctggaattccaaaacgagtctacggatgcggaagaatttatggaatcgctgaaaatcgatctgttttctgacatggtatacgtatttacgccaaaaggcgatgtcattgaactgccgtcaggctctgtgccgattgatttttcctacaggatccactcagagatcggcaacaaaacaatcggggcgaaagtgaacggaaaaatggtgacgcttgaccataagctccggacgggcgacatcgtcgagattctgacgtccaagcattcttacggtccgagccaagactgggtcaaactggcgcagacgtcccaggcgaaacacaaaatacgccaattctttaagaaacagcgccgtgaagaaaatgtcgaaaaaggccgtgagcttgtcgagaaagaaattaaaaatcttgattttgaagtgaaagatgttttaacgctcgaaaatcttcaaaaagttgccgacaagttcaatttctcaaatgaagaggatatgtacgcggcggtcggatataacggcattaccgctcttcaggtggccaacaggctcaccgaaaaagaacggaagctgcgtgaccaggaagagcaggaaaaaatcgttcaggaagtcacttccgagccgaaacattatcctcaagggagaaaacgggaagcgggtgtgcgcgtaaaaggcattgacaaccttctcgtccgcttgtcgaaatgctgcaacccggtgccgggcgaccatatcgtcggttttattacaaaagggcgcggtgtatccgttcaccgggacgactgtccgaacgtcaaaacgaatgaagcgcaggaacgtctgattcccgttgaatgggagcatgaatcacaggttcaaagacgcaaagaatataacgttgagattgagattttggggtatgaccgtctcgggcttttaaatgaggtgctccaagccgtaaatgaaacgaaaaccaacatctcctctgtctccggcaaatccgaccgcaataaagtcgctacgattcatatggcgatttttattcaaaacattaaccatctgcacaaagtggtcgagcggattaagcagatcagagacatctattcagtccggcgggtaatgaactaaaaggagcttgctatgaaattagttgttcagcgtgtaacagaagcgagtgtgacggttgacggcgctgtcgccggccggatcggacccggtattatggcgcttgtcggcatcactcatgaagatacagaagaagatgccgcttacttggcggataaaatcgtgaatcttcggatatttgatgatgaaagcggcaagatgaatttatcgcttttggatacgggcggggagattttatccgtttcccagtttacgctttacggcgaaacaaagaaagggagacgcccgaattttatgaatgcggctaaaccggatcaggctgtgctcctttatgaaaagtggaacgaactccttcgggaaaaaggagtcaaagtggaaaccggaatattcggagccatgatggatgttcagctgacgaattccgggccgattacattgattatggattctaaacaataaaaaagctgccgttcggcagctttttttttatgattgaaaataatgttccaatccgctttcaattccgtctgtcactttttcctgataagagccgctatgtatgattgtttcttcttgcggttgactgagatagccgagctcatacagcatggcaggccgtttattttccctcaggacgtaataatcgccaaacagaacgccgcgatcaggaataggggaacgcttcactacttcagaatggacgtctgaggcaagctggcggtccttagacggactgtaataataagccgtgcttccccgcgttgacgtatcggcataactgtcatagtgaatgctgataaaggcatccgcattccggtaatgagaggttgaaaccctggcctgcaggctgataaatgtatcatcctgtctggtgatatacacgtttgcaccggccgctctcaattttccggctaacagcttagctgttttaatcgttacgtttttttcaaactttccggagtagccgatcgttccgctgtcttttcctccgtgtccgggatcaacgacgatcgttttgtttttaagtgagccgctgccgcctgacgtgttgggagaaggtgcttcgcctgtttcctcaccgctttttgacgtttgtacgacccagtctgccacatatgcggtttgtccgttttcaagccggacttcataccatttgccgcttgagccgacaatcgggtaggctgcgcctttatctgccctttttacgatagaagcggaagtcgaggccgagctccttaagttggtgccgccgtaaacaatatacgcttttttcgaggagcctgagcccgcagaaccgtctcccgagccggatgcgctgcccgatgagtcagaatcctttatgatgtagtggcttgctgcccagcctttttgcccgtttgcttcaattttcagccagccgtggtcttcacttaagatggaaacctttgttccgcgtgataatttagtcataatcgctgaatcatgtgacgctgcacttctgacattcaatgaagaaacgccgaccgtcccgctttttgacccgcttcgggccgaagttgctttcgtatccgatccgccgctgtccgcggtgacgtattcggaagaaacccacccggttgtgccttgataagaaatgttcacccatccgctgttcttgtccagcacggatgcatgcgcgccttgcggaagtttgccgatgacttcatacgatgtccccgggccttttctgatgcggaggtcaggatcggtggaagtgaccgttccgctttttgcggatgaattgtctgctcccccggctgtttttgatatcagccaggaaacgacccatccggttttaccggggctcagctgaagctgtacccagtctccctcttctttaacgatcgggtatctttcccctttttttacttcagcctttattccgtagctcaggccgggaccgcctctgacattgatcttgtctgtcgcgatgaccgcttctccctctgcggcgattgcggtgtgaaatgacggaagaagcgctgtgatgatgacgccgcataaaataagagcaagagttctcttcttcatggctgtcctcctttctgaactaactaaaatacattcttgtataatatcgtattttccttgctgaatgttaaataaaaataaaatggtttgtttatactagtcataaatacagcgaaaaggtgtgcaaatcatgaaatatcaaccaaaaatgggacgcgcgctgcacgatgcggaaggaaatctgcacttcagtgatcagagcgatagagaaaaggcgggttttcttgaagagacggcgacggagttcggtctcttatcgaaagaagcggtcgcaaggaaaaacagacggaataaaacttgacaggggagtgcaatcccattattataatagaaattgatgtacataactcatgataacgattttgaaccgataatggagaagagtaggtcagaatgcatggaaaagagaggaaccgtcccgggctgaaagcggatccgcactgcatctttctcgaaacaacactccggaggttccctgctgaacgcttttgcaagtcattaggcagcggacgtgaacctgcgttaaaggtcagagcggggatgcttcggcattccaactagggtggcaccacgggtataactctcgtccctactatacatgtatagtaggagcgggagtttttttatttgaagaaagacattaaggaggcctgtaacatggcatatcacattccaagaggcacacaggacatactgccgggtgaatcagacagatggcagttcgtcgaacaaattatgagggagacgtgccgcacttatcaatataaagaaatccgcacgccgatcttcgaacatacggaattattcgcaagaggcgtcggtgagtctacagatatcgtgcagaaagaaatgtacacgtttgaagaccgcaaagggagaagcttgacgcttcggccggaaggaacagccgccgcagtccgcgcgttcaatgaaaataaattatttgcgaacccggtgcagccgacgaagctttattatgtcggaccgatgttccgttacgaacgtccgcagacagggcgtttccgccaattttatcaattcggaattgaagcgatcggctccaaagatccggccgtggatgcagaagtcattgcgcttgcgatgagtatttaccgtaaagccggtttgaaacatgtcaagcttgtgctgaacagccttggtgaccaggagagccgcaaatcctaccgggaagcgctcgtcaaacattttgaaccgcgcatcggagaattttgctcagactgccagtcgcgtctgcacacaaacccgctcagaattcttgactgcaagaaagacagagagcatgaactgatgaaaacggctccgtccattcttgattacttaaatgaagaatcagccgcttattttgagaaagtaaaacaatacttaaacggtctcggcatcccgttcgaaatagatccgaaccttgtcagagggcttgattattataaccataccgcttttgaaattatgagcaatgccgaaggattcggagcgattacaacccttgccggcgggggccgctatgacgggcttgttgaacagatcggcggacctgaagcgccgggtatcggatttgcgatgagcatcgaacgactgctggcagccattgacgctgagaaaacagaccttcccgtcaatcaggggatcgactgctacatcgtgacgctcggagaaaaagcgaaggattattccgtttccctcgtgtacaaactgagagaagcgggcatctcaagtgaaatcgattatgaaaataaaaagatgaagggccaattcaaaacggctgaccgtctcggcgcacgttttattgcgattttaggggaagatgagcttgcccaaaataaaatcaatgtaaaagatgcggaaacaggagagcagcgtgaagtggtgttagacgagctgatacaagtgttaaaggcagatcaaaagcagtgaaggagaggaacgctatgtttggaagaacatattattgtggcgagataactgaaaaagcgattggcgaaaccgtcaaactgaaagggtgggtgcagaagcggcgcgatctcggcggcttgattttcattgatttgcgtgaccgctcgggtattgtgcaagtcgtgttcaaccctgacgtatcgaaggaagcccttgccgcagcggaagcaatcagaaacgaatatgtgcttgatatcgaaggcacggtttctgcccgtgaagaaggcacggtgaatcccaacctgaaaaccggtaaaattgaaatcaaagctgaagcggtgacggtgctcagtacggcgaaaacgcctccgtttccgatcagtgaccaggcggctgacgtttctgaagacgtccggttaaaacaccgctatttggatttgcgccgcccggcgatgtttcaaacattgcaaatgcggcatcaagtcacaaaatccatccgccatttcttggatgaaaacggatttcttgatattgaaacaccgattttaacaaaaagttctcccgaaggcgcccgtgattacttagtgccgagccgggtgcatgaaggggaattttacgcccttccgcaatcgccgcagatttttaaacagcttctgatggtgtcgggctttgaacggtattatcaagtggcccgctgcttccgcgatgaagacttgcgtgccgaccgccagccggaatttacgcagattgatattgaaatgtcctttatgagtcaagaggacatcatggctctggcggaagagatgatggcgaaagtcatgctcgaaacaaaaggcgttgaagtatcgcttccgcttccgcgaatgacatatgaagaagcgatgaacagctacggttccgacaaacccgatacccgcttcggcatgctgctgacggacgtgtcagacatagtgagagatactgaatttaaggtgttctcatcagccgtggcaaacggcggcgttgtaaaagcgatcaatgtcaaaggcgctgccggcgactattccagaaaagatatcgatgcgctcggcgtttttgccggaaattacggcgcgaaaggtctcgcttgggtgaaagtagaagctgacggcgtaaaaggcccgattgcgaaattctttgatgaagagaagcaggcaaaactggctgaagcgcttgatgcttctgaaggcgatctgctcctgttcggcgctgataagtttgaggttgtggctcaatccctcggcgcgcttcgcttaaagctcggcaaagaacgcggcctgattgacgaaagcctcttcaacttcctgtgggttgtggactggccgttattggagcatgacgaggaagaaggccgtttctatgcggctcaccatccgtttacaatgcctgtccgtgaagatcttgacctgattgaaacggcgcctgaagatatgaaagcgcaggcttacgacctcgtcttaaacggctatgaactcggcggaggctcaatccgtatttttgaaaaagacgttcaggaaaaaatgttcgggcttctcggctttacaaaagaagaagcggaggaggagttcggataccttcttgaagcctttgaatacggcgctcctccgcatggcggaatcgcgctcggcttagaccggttggttatgcttcttgcaggccgcactaacttaagagatacgatcgctttcccgaaaacggcaagcgcaagctgccttcttacggaagcgcccggcgaagtgagcgacgcccagcttgaagaacttcacctttctgtcaaaagaaaagtgaaacagtaaagatcggcagtttgtttcttgaaaatcaaaatctgctgtgatatgattttgacaagttaaataaagtcctgatgtgttagttgtacacctagttttgaccgaacatttttttgatttgggagcccgcatttttaaatggcgtacatgcctcttttcattcgctaaagaggacttacaagatttaaaaaagggcacccacctgctgagagcgggttcaaaacgaaggaaagctgcaacggcacaattgggactttattttttgtgcgctaaaaccagcggctttttgacaagccgagtttataaaaccagaatgtggagtgaggttcttgttacatcagttttccagaaatgagctagcgattggaaaagaagggctggacacgttaaaaaacagcacggtggccgttctcggcgtcggcggagtcggttcattcgcagccgaagcattggcgaggtccggagtggggcggatcgtgcttgtcgataaagatgatgttgacattacaaacgtaaaccgccagctgcatgcgctattgtcgacggtgggacagccgaaaacagaattgatgaaagagcggatcgctgatattaatccggattgtgacgtcgtcgccttaaaaatgttttatacagaagagacgtatgagcagttctttgagtatccgctcgattacgtcattgacgcgtcggatacgattcattataaaattcatctgatgaaagaatgtctgaaacggaatgttccgctgatttcaagcatgggagcagcgaataaaacagacccgacacgctttcagattgctgatatttcaaaaacccatactgatccgattgccaaagtcgtccgcacaaggcttcgtaaagagggcattaaaaaaggcgtacaggtcattttttctgatgaaagcccgatcgtcatccgtgaagacgtcagaaaagaagtcgggaatgatgaagcgaaaatccgcaaagcgcaaatgccgccgtcttccaacgcctgggttccgtcagtggccggtctgattatgggcggacatgttgtcatggagctcttaaaggacatcgacattaaacgggttaaagataagtaaaaagaaaaacagccttcttcaggaaaggctgtttttttatttgaatccgccgtttacacgaaagatcttgtccggttattttttctgcttcatcagtttttcatacacttgctttatggcggcttcaaatttccccgtttgtttcggtttatagtattgcttgttttttaacggatcgggcaaatattgctgttcgacccatccgttctcgaaatcgtggggatattgatagccgatcccgcgtccgagctcttgggcccctttatagtgggcgtcttttaaatgtttcggcacatcgccgattttacccgtcctgatgtctttgagcgcctcatcaacggctgaaatggcggagtttgatttcggtgagaggcataattcgattaccgcattggccagcggaattctcgcttccggaaagccgatccgttctgcggtctgaatcgcgctcagcacccggggcctgcctgcgggcttgcgaggccgatatcttcataggcgatcacgagaagccttcttgatatgctttcaaggtctccggcttcgatcagacgggccagataatgaagggcggcgtttgcgtccgagccccggatcgatttttggaacgcggataagacgtcataatgcgcatcgccgtttttatcatgggtatagctttttttctgcagacattcttccgccgtttcccgtgtaatccggatcgtcccgtcgcttgattcctttgtggagagcacggcaagctccagtgcgttcaaagcggagcggacgtctcctccgcacccttgtgcgaaatgatccatcgcgtcgtcgtccaccgaaacgctgtaggaaccgagtccccggtgttcatctgtgagcgctcttttcaatgcctgcctgatcagatcgggtgttaacggttcaagctcaaatatctgggtccggcttctgatggccgggttaatggcatgataagggttggcggtcgtcgcgccgattaaaataatcatgccgttttctaaatagggcagcagaaaatcctgctttcccttatcaagtctgtgcacttcatcaaggattaaaatgacctggcctgacattttcgcttcctgtacgacaatctccatgtcttttttattatgaatgacggcattcaatttcctgaatgcgatgcttgtcgatcctgcgatcgctgtggcgatggacgtttttccgatgcccggcggtccgtacaggatcatggatgataagtgcttcgcacgcaccattctgccgatgattttatcttctttgaccaaatgttcctgaccgataatgtcttcgatattggcaggccgcatccgatacgccaatggtttcatgaacatctctccttacatatacagggtaacggaaaacggacgattagaaaagcgaattgcggcgggccccgtgtttcaatgaaaattaggataagttatgttataataacagttggtctataagatactaaacagattattcatatccatttacttgtataaattaacaattagaattgactggggtgttcatattgaaaatatcgacaaagggaagatacgggctcaccattatgattgaattggcgaaaaagcacggagacggtccgacgtcgctcaaaagcatcgcccaaacaaacagcctttctgagcattacttggaacagcttgtatcaccgctcagaaacgccggactcgtaaaaagcatcagaggcgcttacgggggttacgtgctcgggggccagcctgaagagataacggccggagatattatcagagtgctggaagggccgatcagcccggtagaagtgcttgaggatgaagagcctgccaagcgggagttatggatccgcatccgcgacgctgtaaaagacgtgctggacagcacgacgttagaagaccttgcgagctacacggacggcgagcaggaagcttatatgttctatatttaaaccagaggtgtaaagacaatggaacggatttatttagatcatgctgcgacttcccccatggatgaacgtgtgctcgaagaaatgaagccccatttcttcggcagtttcggcaacccgtcaagcattcattcattcgggagagaatcccggaaatgggtcgatgaagcgagagcggacatcgcgcgcgaaatcagtgcgaaagaacaggaaattattttcacaagcggcggtacggaggctgataatttagccattttcggaacggctgccgcccggaagaatgaaggaaagcatatcattacgaccgctgttgagcatcatgctgtattgcacgcctgcgaaaagctggaagaagacggctttgaggtgacatacctcatgcccggcccttcaggacggatcagtgcaaatcaggtgaaagaagcgctccgtgatgatacaatccttgttaccgtcatgtatggcaataacgaagtcggaaccattcagccgattgacgaaatcggagagctgttaagcgggcatcaggcctattttcacacagatgccgtccaggcattcggttatatgccgattgatgtgaaaaaaagcagaattgacatgctgtctgtttccggtcacaagcttaacgggcctaaagggacaggctttttatatgtaaatcaagaggtgaagctgtcaccgattcttcttgggggagagcaggaacgaaagcgccgcgcggggacggaaaatgtaccgggcatcgccggcttaaaagaagcggtcgtcctttcaaaccgtgagagggaagagaaaacagcgaagtataaggagtttaagaacatcatcatgagcacgctggaagaagccggcgttacagcggaggtgaacggagatgccgagaaatgcctgcctcatattttaaacctttactttcccggtgtgccggtggaagcgctgctggtcaatcttgacatggaaggcattgccgtctccagcggatctgcttgtacggcgggatccgttcttccgtcccatgtgcttacggccatgttcggaagtgagagcggcaggctgacttcgtcaatccgcctcagcttcggcctcggcaatacggcggaacaaatcgaaacagccgccgaaaagcttgccgccgtcgttaaacggcttgcttaaaacggcggacttatgtttttaatggagtgaatgcaaatggaaaaacggccggaggatacaagagtcgtagtcggcatgtccggcggcgtggactcttccgtggcggcccttctgctgaaggagcagggctacgatgtaatcggaatctttatgaaaaactgggatgatacggacgaaaacggtttttgcacggcgacggaagattatgaagacgtcatccgggtctgcaaccagatcggaattccgtattatgccgtcaattttgagaagcaatattgggaaaaggtatttcaatatttccttgatgaatataaagccggaagaacccccaatccggatgtcatgtgcaataaagaaattaagtttaaggctttcttggatcatgctctgtcactcggcgcggattatcttgcgacgggccattacgcccgcgtggacagaagcgcagatacagtgcgcatgctccgcggtctggatgaaaacaaggaccagacttattttctgaatcagctcaatcaggaacagctcagtaaagtcatgttcccgatcggtgatctgcaaaaaagccgcgtgcgggaaattgccaaagaagcagaacttgcgacagctgcgaaaaaagacagcacgggaatctgctttatcggcgaacgcaacttcaaaacgtttctcagccaatatctccccgctcagccgggcgatatgatgacaatggacggagaaataaaagggcgtcatgacggtctgatgtattatacaatcggacagcgccacggtcttggaatcggcggaagcggcgagccgtggttcgccgtcggtaaagatcttgaaaaaaacattctgtatgttgatcaaggattccataatccgcttctgtattccgataagatcacggcgacaaatgtcagctggacgcgtcccggtctgatggacggcggcgaaatgacatgcacggcgaaattccgctaccgtcaggaagatcacaaagtaacggtgaaaatgacgggtgatgatgaagcggaaatcatttttgacgggcaggtacgcgccgttacgccgggacaagccgtcgttttttatgacggagaagagtgcctcggcggcggaacgatagatgacgtttataaagacggaacaaaactgtggtacgtataacacatgtaaaaaacctcaactcgcatgttggggttttttagcgaaaggaagttaaaaatggattataataaaatcgggattgacgccatgcaggagggcgattttgaaaaagcggcagaggcttttacgaaagcgattgaggaaaacggccaagacccggtgccgtacatcaacttcgcaaatctgctttcttctgtgaacgaactcgaacgggcgcttgcattctataacagagcgcttgaattggacaattcggcggcagccgcttattacggtgcgggaaacgtatatgtgatgaaagaatcgttttccgaagcgaaggatatgtttgaaaaagcgcttcgctccggaatggaaaacggagatttgttttatatgctggggaccgttctcgttaaattagagcggccgaagcttgcactgccgtatctgcagcgtgccgttgaattaaacgaaaatgacacggaagcgcgcttccagttcggaatgtgtcttgcaaatgaagaaatgctggatgaagctcttgcgcagtttgagacggtgatcgagcaggatccaggccacgcggacgcattttataatgccggggtcgcttacgcgtacaaagaaaatcgtgaaaaggcgcttgagatgctggaaggcgcaatcggcatacagcctgatcatatgcttgcgcttcatgcgaaacagcttatcacccagtcataacaaaaggagggaaggctcgtggatcagctgaacatcgaagaacagccgtatgtaaaaggcgtcattcatacggtcatttatcataatgacaccaacctgtatacagtgctgaaagtcaaggttgcagaaacgtctgaggcgatcgaagacaaggtcgtatccgtaacgggctacttccctctgctgcaagaagatgagacctacacattttacggaaaaactgccacgcatcctaagttcggcctgcaatttcaggctgaacactttaaaaaagaaattccgaccacaaaagaaggaatcattcactatttatcaagtgatctgtttgaaggaatcggaaaaaaaacggcggaagaaatcgtcaaaaagcttggagacggcgcgctcaataaaattctggctgatgcgtcggtgctttatgatgtgccgaaaatgtcaaaaaagaaagcggacaaactggcgggagagctgcagcggcatcaggggcttgaacagattatgatctctctgaaccaatacggtttcgggccccagctatccatgaaaatatatcaggcctacgaaacggaaaccttggagaaaattcaggaaaatccttatcagcttgtaaaagacgttgaaggcatcggctttgtgaaagctgacgagctgggcggaaaaatgggtctgtcaggaaaccacccggagcggatcaaagcggcaatcttatatacgattgaatcgacctgtctttcagagggccatacgtacatagagacaaagcagctgattatcaatacgcaaacgctcctgaatcagtcagctgaaggcggccgcgtcacggaaatggatgcggctgacggcatcatcgccctcggggagagtaaggatatcgtcatcgaaggagagcgctgctattttccctccttgttttacgcggaacaaaacgtcgcaaaacgcgtgctcgacattgcggctcagacggagtatgccgatcaatttcctgaatcggaatttctgcttgcactcggtgaactggaagaacggatgaatgttcaatacgcaccaagccaaaaggatgccattcaaaaagcgctgtcttcaccgatgcttttactgaccgggggacctggaacggggaaaacgaccgttattaaaggaatcgtggaattatacagtgaactgcacggcgtatcccttgaccccggtgattataaaaaagacgaggcgtttccggtgctgcttgccgcgccgaccggaagagccgcaaaacggatgagcgaatctacgggtctgccggctgttacgattcacaggctgctcggctggaatggcgctgaaggctttacctacaacgaagatcagccgattgaagggaaactgatcattatagacgaagcgagtatgcttgatatctggctcgccagccatttgtttaaggcgcttcctaagcacattcagctcattgttgtcggtgatgaagaccagcttccttcagtaggaccggggcaggtgctcagagatcttttggcttctgaagtgctgccgaccgtgcgcctgacagatatttaccgtcaggctgaaggatcatccattgtggaacttgcccatgatatgaaaaaaggactgcttccaaaggggctgaccgcgccgacaaaggaccgctcatttatccgctgtaattcttcacagattaaagaagtcgtggatcaggtcgtctcgaatgcgttaaaaaaggggtatacctccagagatattcaagtgcttgccccgatgtacaggggaaaagcgggaattaacgagctgaatatgcttcttcaggacatcatgaatccgcctaaagaaaaaaggcgggagctgaaattcggagatgtcgtctacaggacgggcgataaaatattgcagcttgtcaaccagccggaaaacaatgtgtttaacggcgatatcggcgaaatcgtgtccattttttatgccaaagaaaatacggaaaaagaagacatggtcgtcgtctcgtttgacggcaacgaaatcacctttacgaaaaaggatttcagccagtttacccacgcttactgctgttccattcataagtcgcaggggagcgaattcccgattgtcgtcctgcctgtcgtcaaaggctactatcgaatgctcaggagaaatctgctttataccgccattacaagagcgaaaaaatttctgattctttgcggagaagaagaagcgcttgaatggggcgtcaaaaacaatgatgccaccgtcagacagacgtcgcttaaaaacaggctcacagagcagactgaagagatggatgcagaactggccgccctgcaaaaagagctgccgttcagtgtatatgatgcgaacatcggaatggaaggcatcacgccttttgactttatggaagaaaaagcgtaaataaaacccggcacatgttcatgcgccgggttttcgcctgtggaagtcatttcaaagtatgctgcctggcttcttggcaaaacctatacgtgttcaacaaaaggtggttgatcacactttgagaacatgccatgcagctgaaggacgaacagtatatgacgaaaacaccgggcgcagtctcgggatgatatcggatgtatgtttctctctggacggccggtttctcggtttcgtgctggagcagaaacgcctgtttcacaaccgtcatctttttttaggggcaagtgatataaaagagatggatcaagaagccgtagctgccggtcatgctcatttgcagcctttgccgaagagctgtttcacctttgaacagattaaaatgcagccggtgaaatcgcctgatggtgaaatgttcggtttgctggaagatgtatacttttgtttggacaggggcataatcgtagcatatgaactctcggacggcttcttttcagatctggctggcagacgccaagtgcgccgcgccgccgatatgcttattgaagcggggaaagaaggcatcgtcctgaacggataagaggtgtagtctgtgcttgtatgtccgaactgcaaaagtaaagatatcggcaaaatcggcgtaaaccaatactattgctggggctgcttcattgagctgacggtggccaaaggcaaaattgcgacacatcaagtagaggaagacggcacgttaagcagtcttgatgatttgttttctgaagacgaacgcagtatcaatttttaaagttgaaaggagatacgcgcgatgggcagaacaatgacctctctgttggctttaggggctggagccgttatgtatcgtatggcttctcagtccgatatgctgaataaaaaaggtatgaaacggatgagaagacgagtcatgaaaatgttttaagcggaaaaaaggatacttctccggaagtatcctttttacgtttgtctcgcttccagccgtctggcagcgagagacaggctgtaattgaccgcgaaatacatcagggccgccagcagaaagatcgggaaaaaataccccccgtcagcgctttgtccgtttaaaatctgcgcgttatgaatcagttcgggcagagcgatgacgaccgcaagtgacgtatcctttaataaggagataaactggctcacaatcggaggaaccatacgcctgagcgcctgcggcatgacgacgagaaaaagagtctgcgtgtacgtcagtcctgaagaacgcgccgcttcaatctgtcctttgtcaacggattgcaaaccgcttctgatgatttctgacagcatggccgattcaaaaatcgtcagcgccgtgatggcggccgcggtaatttccagtttgatcccgatttccggaagggcaaaaaacgtaaagaaaatgattaataacagcggcaggttgcggatggtttccacaatggccgctataatgcccgagacgataggaatgttcgcatagcgcaaagtgccggcggcaagcccgaacataaaactcaggacaatggagatcagcgcaacataaagtgtgaccaaaaagccgtcccataaaaacagcagatggtcaggtgtataggcgccgctaaaatccatgttattcactctccttctctaataactttttccgagacgtctttccaaatagtgaaccccgatgctgagcgggatcgttaatatcaaataaaaaagcgcgacgaaaatatagacatcaaacacgacaagagtgctcgaggacacgagatccgcctgatacatcaaatcgagtcccgccaccactccgagtattgatgagtttttgacaaggttgagaaattggtttccgagcgggggaatgacgatttttacggcctgaggaagaatgatatatctcatcgcctgactgtaggtgaagcctgacgatctggccgcttccatctgccctttggggacagtctgaattccggctctgatggcttctgcgataaaggcggacgtgtaaatcgtaagcgcaatcgttcccgcctgaaagccgtccagtctcagcccggcgttcggaagtccgaaataaaaaacgaatgtgatgaggagaagcgggatgttacggataaattccacatacgcagtgccgatccattgaaggggtttgaaagccgtgattctcatgactgcgatcagaacgcccagcgcaaagctgcctgccagcgcgatgaagctcgcaagcaatgtgtgcaggaaaccgtccatatacatatcgaagttttccgttaaaattgaaaagttcatctatgtcactccttataaaacggggatgagcatgcatgctcatcccgcggtccgtcctattttgccggttcttcttttatccattttttatagattttttcgtacctgccgtcggctttcatttttttcaaagaggcgttgatttctttgacaaggccggattggcctttttgacggcgattccgtaaggttcatcggtaaaggtttcgcccgtcagctgatattgtttattttcatcggccatgccgtataaaatcgcattatcggttgtgagcgcatctccctgtcccgctttaagcgcagtgaacgcttcggcgtaattttcaaattccagcactgaggcgtcaggcgctttttctctgatgttctgtgaggaagtggagccttttaccgccaatacttttgagccttttcccaggtcttcggtgcttttgatgctgcttccttttttgacgagcagggattgcccggcttcaaaataaacatctgagaaatcaacttcttttttccgctcatccgttatcgtcatcgtggcggtgatggcgtcgatatcgccgttttgcagcatcggaatcctcgtttttgacgtcacttctttaaattccgctttcttctcatcccccagaatatcttttgcgagctgttttgagatatcaatatcgaagccttcaatatcaccggagcttgggtttttcagcccgaataacctcgtatcggttttgacgccgaagatgattttgtctctgtctttaatagaggctaacgtgtcttttcccgttccttttgaatccccggacgtttctttccctccgcaggctgccagcataaagacggccagcagtgatatcaatccgaatgacaaccattttgttgcgcgtgacataagcgctcctccgtttcttttcagtgatttaaaatacggcttaagaataaacgcgccctctcttcacgggggctttcgtaaaattcagccggtgcagcttcttctaagatggatccgccgtcgataaacacgatgcggtccgccacttcttttgcgaatcccatttcatgtgtgacgactgccatggtcatgccttcctttgcgagtgttttcatgacatccagcacttccccgatcatttccggatcaagcgcggatgtgggttcatcaaacagcataatttcgggcttcatcgcaagcccctggcgatggcgacacgctgctgctggccgccggaaagctgtgaaggataagcgtccgctttgtccggtataccgacttttttcaaatagtataaggccgtttcctttgcttcttcttttgattgcttgagcactttgatcggtgcgagcatgatgttttgcagaacggttttgtgcgggtacagatgaaaatgctgaaacaccatgccgatattccggcggacctgatttatatccgttttcttgtcacggatggagacgccgtttaccgttaaggcgcctccatcaactgtttccagctgattaatgcagcggagaagcgtgctttttcccgatcctgaaggtccgatgataacgacgacttccccttttttaatgtgcagattaatgtttttcagcacgtggaaatgtccgtagtgcttatttacatcctgaaatgaaatcatggccatcctccttaaaaaaacatgagtcatattgactggacagttttgaaatcctttaacacattacgatggttatacagacttttatgaatattatttagattatttcgtaatttctgataattatttccgtcaagaggtctgcgtcataaggcgtagtttatgaaacgggaataattccggctttctgtcaaaagataaagcaagaggtgaaacgtcatgcttcaaaaaccgctgcagctcttaatgtggacagctgtatgtctgctcgttttgttaacagtgtatgtcttttgcatgctcgatatgttatggtctcccatttggcttgttataaaatctctctttattcctatattcatcgcagtatttattgcttatcttttacttccgattactgaatggcttcatagaaaagggatgcctagaactttaagcctgcttctgatttattgcctgtttttcggcggaatcggctggggggtttataaaggggttcctgttttaattgaacagctgcaggatctgtctgagagcattcccggtcttgccgaaaactacaacagcatgctgaggcatctgcataatcacacggatcattggcctgacggcatgcaccatcggatggacaaaatgattcagcagacagaaacgtttcttgccggcacgattgaaagcacgatcagaagcatccgtttcgtgcttgattatatcctgatcgcggcgacgattccttttctcgtgttctatatggtgaaggatataggcgtcatgaaaaagacggtctggtatttgacgccgaagtcctggagaaaaagggggagtgaatttctgcgggatgtggacgactctctcggtgattacatccgcggtcagcttctcgtttgttttttgctcgggttaatagccggcgtttcattttggctcttcgggcttccttacccgctgattttgggccttgccatcgggattacgaatgtcatcccgtatttcggcccgtttatcggcgctgtgccggcgctgctcctttcgctggcgatttcctccaaggctgtgatcatcgtaatcgtcacgatttttattcttcaatttatagaaggaaacattttgagcccgctcattgtcgggcgaagtctcagaatgcaccccgtcgtgatcatgcttgcgcttcttgccggaggagagctcgcgggcattcccggcatgattctcgctgttccggcggcagccgttttaaaagtgacggccattcactttttgcggatcaggacggaacattgacattcgggttctgcttgtctataatttcgagtagaatacatacgaatctcgagtgacggataagagtacgccgaagccctgtttaagagagaagctccgatacgctgagaggagcttcagcagaagatcggccgaagctaatcctgagtgcagttaaaggctgccgcaatcctgcgttacgggatgaaaggtgacaggcctttttcggcctgtaatcagggtggtaccgcgagacagctctcgtccctgtgtgaacgcatggtttgcatagggagagagcttttttgctgtcgcaaaagagaatttcgggtagtgataaggaggaatatagatgaaacacttaacttctgctgaagtacgtcaaatgtttttagatttctttaaagaaaaaggtcatgccgttgaaccgagcgcctcattggttccgcatgaagatccgtctttactgtggatcaacagcggcgttgcgacgctgaaaaagtactttgacggccgcgttgtgccggagaatccgagaattgtaaacgcgcaaaaatcaatccgcacaaatgatattgaaaatgtggggaaaacggcgcgccaccacacgttctttgagatgctcggaaacttttccatcggtgattattttaaagaagaagccatcacgtgggcatgggagtttttaacgagcgaaaagtggatcggctttgatccggagctgctgtctgtaacggttcaccctgaggatgaagaagcttatacgctatgggcggaaaaaatcggcgttccggaagaaagaatcatccgtctggaagggaacttctgggatatcggcgaaggcccgagcggaccgaatacggaaattttctatgaccgcggcgagaaatacggtaatgacccgtcagattctgaattgtatccgggcggcgaaaatgaccgctatcttgaagtatggaacctggtattctcagagttcaaccacaacccggacggcacgtacacaccgcttccgaagaaaaacattgatacgggcatggggcttgaacggatggtctccgtgattcaggatgtcccgacaaactttgacactgatttgtttatgccgattattgaagcaacagagcgcatttccggagatgcttacggaaaggacgcaatgaaggatacggcctttaaagtgatcgccgatcatatcagaacggtcgcatttgcggtaagcgacggagctctgccgtcaaatgaagggcgcgggtatgtactgagacgcctcttgcgcagggcagtgcgatacgcgaaaaccatcggtatcagccgtccgtttatgtacgagctggtaccgactgttgcaggaattatggacgctttctatccggaggtgaaagaaaagcaagagtttatcgccaaagtcatcaaaacggaggaagagcgcttccacgaaacattaaacgaaggtctggccattttatctgacgtgataaagaaagagaaggaaaaaggcagcggcatcatctccggaaaagacgtattcaaactgtacgatacgtacggattcccggttgaattgacggaggaatacgcggaagatgagcaaatgaaggttgaccataaaggctttgaagccgaaatggaaaaacagcgtgaacgggcgagaaatgcgcgccaagatgtaggaagcatgcaggtgcagggcggcgcattgcgcgacattaccgcagaaagcacatttgtcggctacagtgccgtaaaagctgaagcgaaggtgatcgagcttcttcatgacgggcaattaatcagcgaggcgcatgaaggggataccgtccaaattcttcttgacaaaacgcctttctatgctgaaagcggcggacagatcggtgacagaggagtgctgagaagcgagcaggctgtcgtaaccattaaagacgtgaaaaaagctccgaacggccagcatgtacacgaaggcacggtggatagcggcacgattcaaaaaggcgcaagcgtgacggctgaagttgaagatcaaatgagaagcggtgtggtgaaaaaccatacagcaacccaccttctgcaccaggcgctgaaagacgttctcggcacacatgtcaaccaagcgggttcactcgttaccgaaaatcgtctgcgttttgacttctctcatttcggtcaagtgacgaaagaagaacttgaacgcattgaaggaatcgtcaacgaaaaaatctgggagagcattccggtagcgattgatttgaaaccgatcaatgaagcgaaagaaatgggcgcgatggccctgttcggcgagaaatacggcgatatcgtccgcgtcgtacaagtcggagattacagccttgagctttgcggcggatgccatgtcacgaatacggctgaaatcggtctgtttaaaatcgtatccgaatcagggatcggcgcaggtacgcgaagaatcgaagccgtaacaggaaaaggcgcttatcaggaaatgaacagccagctcagccttctgcagcacgctgcggatgagctgaaatcaaacgtaaaagacgtaccgaagcgaattcagtctcttcaagcggagctgaaggaagcgcaaagagaaaatgaatcattgctcagcaaacttggcaatgtggaagccggagccattctgtcaaaagtaaaagacatcggcggcgtaaaagtgctggctgaaaaagtaaatgcgaaagacatgaaccaccttcgtactatggtggatgatctgaaagcgaagctcggttctgcggtcatcattctcggcgccgtgcaaaacgagaaagtcaacctttcagcaggcgtgacgaaagacctgattgaaaaaggccttcacgccggcaaaatggtcaaacaagcggctgaagtctgcggaggcggaggcggaggccgtccggacatggcgcaggccggcggaaagcagcctgaaaaattggaagaggcgctcgcatctgcggaagattggataaaatccgttttataatcctttcaactagtgtagaatgatgataagatgaggacctcaggctgaactttgcctgcgaatttgggaaagaggtgcaaaacggtgagctcgtttgataaaacgatgaaatttaatttctccgatgattctgctgaaacaaacgtcgaagaagtgctgattacggtatatgatgcgcttcaggaaaaggggtacaatcctatcaaccagattgtcggatacttgctgtctggagatcctgcatacattcctaggcatcgcgacgcccggaacttaattcgcaaactggaacgtgacgaattaatcgaggaattggtaaaatcctatctagaacagcataaagaggcgtaaatacattcatgagaatattgggacttgatcttggaacgaaaacactcggcgtagctttaagcgatgaaatgggctggaccgctcagggcattgagacgataaaaataaacgaggctgaaggagattacggtctggaccgtttatccgagctgatgaaagactataatgtagagaagatcgtgctcggttttccgaaaaacatgaacgggacgatcggtccgagaggcgaagccagccaaacatttgcgaaactgcttgaaacagcgtacaatgtccctgttgtgctgtgggacgagcgtctgacgacgatggcggctgaaaaaatgctgatcgcggctgacgtcagcaggcaaaaacgaaaaaaagtcattgataaaatggcggctgtcatgatccttcaaggatatctggacagtttaaactaagaggtgaaagaaatggaacacggcgaaaaacatattacaattgtcgatgatcaaggcaacgaacagctttgcgaagtgctgttcacatttgaaaacgacacattcaacaaatcttacgtactttattatccgattgatgctcaagacgatgatgaaattgaaattcacgcttcaagcttcgaaccgaacgaaaacggtgaagacggcgaactgatgccgattgaaaccgatgaagagtgggaaatgatcgaagaaacgctgaacacgtttttagcggaagaagacgaagaataaaatgaacggaaaaagccggagcgcatatgcgcttcggcttttttttgtaataaattgccgaatgcacatgaatcatgtagtataagagctgttgggaggaaaatacttgtatgaatatcaatcagactaaaaattcatttccgcgtaaaaacaaaaaaacaacgataatactgtcctccgtgatcgctctgcttatcatcatttgcggtgcttttttctatggaaaatctctgctgtccccggttgacaaaggcagcaaaacggcagtcaatattaatattccgagcggttcttccgtttcggcaatcgctgaaattcttgaggatcagcatgtcatcaaaagcaaaaaagcatttcagctgtatgtgaagtataaaggcgcttccgggtttcaggcgggattttaccacctgaataaaggaatggatgcggatgcgattatcaaaaaactgaccgcgggatcaacgggatatgcctttcagatctccgttcctgaaggaaaacagcttacacagattgcggatgcgatcgcaaaagaaacatcatattcaaaagaagagatcatggcaaaactggatgacaaaacattcatcggcaaactgaaaaaacagtttcctgatacaataacggacgcactttcaaacaagaagctcaagcatccgctcgaaggctatctgtatccggccacatatccgtttaatgatccggatgcatcgcttgacacgattttgacggcaatggttcaggaaacaaatacccgtatcgaaacgtataaatctgaactggaaaaaaagaaactttccgtccataacgcgctgacgatggcatcgcttattgaagaagaagccaccgccaaagccgaccgtcacaaaatcgccagcgttttttacaacaggcttgcagaaaaaatgccgctgcagactgacccgacggtattatatgcggccggtaagcataaaagccgggtctactacaaagacctgaaaattgattctccgtttaatacgtataaacataaggggctgccgccgggaccgattgcaaatgccggtgattcatcatgggaagcggctctccgccctgacaaaacggattatctctatttccttgcaaaaccaaacggcgaggtcgttttcaccaaaacattaaaagaccataataaagcgaaggaaaagtatatttccaaaaaagacagcgaataaaaggagggcaaaagctctccttttattccattctgaaaggttttatgataaaatatatcgggttgtttacttatggataaagaagtgtcttaagagagtgtccccgcggattcgtcaggggcactcctttttagaacggaggctgtttgccgtgaatgatcggtatgaacaaataaacgagtatataaacgcgatgctgaagcctcggcctgataaagtgaaaaagcttgaagcctatgcaaaagagcaccatgttccgattatggaagaagcgggcattgaagtgctgcttcaaatgctgtcgattcaacaggcgaaaaacattttggaaatcggcgcggcaatcggatattccgccatacggatggcgcttgagcttccggatgcgaatatttacacgattgaacgggacgacaaacgctatgaagaagctgtgaacaatataaaagactttgaaatggaaaaccgggttcacgtaatgcacggggatgcgctggaactttctgagtctgtccgtgtcacggctccttatgatgccatttttatcgacgcggccaaaggccagtacacgaacttttttgagctctatgaaccgatgcttgcgccggatggagtcatttttacagacaatgttctgtttaaaggactggtggcacaaaatcactcggacattgagccgaaaagaagacggaagcttgttgaaaaaattgatcaatataaccaatggctgatgaaccggcctgactatcaaacggtcatactgccggtcggagacggcatcgccatcagtaaaaagaagaggtgaatgatcatgaaaaaacctgaacttttggtgactccgacttctgtacaggatattcttccgctcattcaagcgggcgcaacggccctgttagtcggagaacagagatacggcctgagactggccggtgaattttcaagagaagatataaaagaagccgtaaagacagctcatcaggaaggcgcgaaagtgtacgccgccgtcaatgctatttttcacaacgaaaaagtggacgagctgaacggctatcttgcctttttgcaggaggccggcgttgatgcggctgttttcggtgatccggccgttttaatggcggcgcgtgaagcggctcccgatcttaaactgcactggagcacggaaacaacgggtaccaactactattcctgcaattactggggacgcaaaggcgcacggcgggcagtgctggctaaggaattaaatatggacagcatcattgacataaaagaaaacgccgaagttgaaattgaaattcaaatccacggcatgacgtgcatgttccaatcaaagcgttctttagtgggccattacttcgaataccagggaaaagtcatggacatcgaacagaagaaaaaagaagcgggaatgtttctgcatgacaaggaacggggcaataaatacccgatttttgaagatgaaaacggcacgcacatcatgagcccgaacgatgtgtgcatgattgatgaattagaggacctgatggacgccggcatcgattctttcaaaatcgacggagttttgaagtctcctgaatacttaactgaagtgacccgcatgtacagagaagcaatcgatctgtgcttcgaaagccgagagacatacgaagagaaaaaagagagctggatagagcggattgaaagcattcagcctgtgaacagaagcatcgacacaggattcttctttaaagaaacggtctattaaaaaggagggtgcaacggatgacagccgtaaatcaaaccatttccaaagtcgtaaacggaaaacgcgtcattacgaaaaaacctgaactccttgctccggcaggaaaccttgaaaaattaaaaattgccgttcattacggagcggacgcggtttttatcggaggacaggaatacggactccgctcaaatgcggataacttctcaatagaagaaattgcagagggcgtagaatttgccaaaaaatacggggcaaaaatatatgtgacaacaaacattttcgcccataatgaaaatatggacggtctggaagaatacttaaaagcgttgggagacgcaaaagttgccggaattatcgtcgctgatccgctgattattgaaacatgccggagagtggccccggacgtagaaattcacctcagcacacagcagtccctttccaactggaaagcggtgcagttctggaaagaagaagggcttgaccgcgtggtgcttgcccgtgaaacgagcggactggaaattaaagaaatgaaggaaaaggtggacattgaaatcgaaacctttatccacggcgccatgtgtatcgcttattcaggacgatgcgtgctgagcaatcacatgacagcccgggattccaaccgcggcggctgctgtcagtcctgccgctgggattatgacctgtatcagacagacggtgcaaacgcggtcgcgctttatgacgaagaagacgctccgtttgcgatgagcccgaaagatttaaaattgattgaatccattccgcaaatgattgagatgggtatcgacagcctgaaaattgaaggccggatgaaatcgattcattacgttgcgacggttgtcagcgtgtatcgcaaagtcatcgacgcatactgcgctgatcctgaaaactttgtcattcaaaaagaatggctggatgagctggacaaatgtgcaaaccgggataccgcgcctgctttctttgaaggcacgcccgggtatgaagagcagatgttcggcgaacacggaaagaaaacaacatttgattttgccggtctcgtgctcgcgtatgacgaggaaactcaaatggtgacgctccagcagcgcaatttctttaaacaaggtgacgaagtggaatttttcggtcctgaaatcgacaatttcacattcacaatcggcactatttgggacgaagacggaaacgagcttgatgctgcccgccatcccctgcaaatcgttagatttaaagtagacaaaaagatttatccgagcaacatgatgagaaaggggaagtaatcaccaatgggtaagagtcctgtagttataggcatcgcaggaggttccggatcaggaaaaacaagcgtcacccgttccatctatgaacagtttaaaggacactcgattttaatgatccagcaagacctttattataaagaccaaagccatcttccgtttgaagaaaggctgaacacaaactatgatcacccgctcgcatttgataatgactatttaatcgagcatattcaagagcttttgaattaccggccgatagaaaagccgatttatgattataaactgcatacgcgttctgaggaaaccattccggttgagccgaaggatgtcattattctggaaggcattctcgttctcgaagataaaagacttcgcgacctcatggatatgaaactttatgtcgacacggacgcggatctccgtatcatcagacggattatgagagatattaacgaaagaggccgttcaatcgattctgtcattgagcagtatgtgtccgtcgtcagaccgatgcacaatcagtttgttgaaccgacgaaacgctacgcggacatcattattccggaaggcggacaaaaccacgtcgcaattgatctgatggtcacgaagattcaaacgatccttgaacaaaatgcaattttgtaataccatagcatagacataaataactcagaccatattatgtataggctggaagggaatgagacagttcccttctttccctgtttataaaccgaaacatttgcagaaaacacacattcagtttaagataaacagtacctatatgggagagaagaacgaggactgccctgtgttctcattcttgattttttcgtttatgctctcatacataatcacacgttattgttgagggacaaccaccaaggagtgaaggaacatggcacaagaaaaagtttttccgatgactcacgaaggaaaacaaaaacttgaacaagaattagagcaattgaaaacggttaaacgtaaagaagtagtagagcgcattaaaatcgcaagaagcttcggagatctgtcagagaactctgagtatgattccgcaaaagaagaacaggcatttgtggaagggcgcatcacgacgcttgaaaacatgatccgcaatgcgaaaatcatcgaggacgacggcggttcaaatgtagtcggtttgggaaaaaccgtatcattcatcgaattgcccgacggtgaagaagaatcttacacgattgtcggaagcgctgaagctgatccgtttgaaggaaaaatctcaaacgactcgccaatcgcaaaaagcctgctcggcagaaaagtggacgaagaagtgacagttcagacgccgggcggagaaatgctcgtgaaaattgtgaaaatttcataagatccgtttaacaatgaaacacctcgtccaaaatgtggatgaggtgttttttatgatcgtatcaaaaaggctgaaaacggccgtgatttgttttctgctcgtgtttttctttctgcttgcaaggctggctgaaattcagctgttttttacagaatctttttcaaaatccaatattaatctgattcaggaaagcgtcaagcagcggacggaagaagtccttatttcagacggccgcggctcttttcttgatcggaacggcaaagaactgaccggaaaaaagcagcctgccgtcatactgtttccctttctcgtgacgcaggattggccggttgaccgggtatcagacattctcggaatgaaacagggggagctcaggcagctgctgacggaagcaaaaaaaccggtgatcctgaacagcagaaaaataaaacatttgacgaaacaatccgtggcaaatatcaattctttgaaatatcccggcatttacggcgtatatatgaaagacagcaaagaaacaaacatagccgctcatctgttgggcgcgacaaaccaggaccctgagcttttgaaaaagaaataccccggcaggaaggaactgccgatcacggcaaaaatcgggacaagcgggatggagcggacatttgatgagtttttactggcggatcaggacacaaaacttttgtatcatgtcgacggaaggggaaaccctttattcggaatggacgtcaaatatacggctgaagcaaacgcgttttatccgctgcaagtcaaaacctccatcgaccgcaatattcaaaaagcaatggaagatgtattgaaagaccgcgggttaaaaaaggggggagccgtccttttagacattgaaaaaagcagtgtgctcggaatggtatcaaagcctgacgccgacatgtcaaagcagcagacactgcaaaattacatgctgacgccgatttatccgggatcagtgtttaaaacggtgatcgccgcagccgcaatagaacaaaacgaagtgaagccgggcacatcctttaactgcaatctcaacctgtacggagagccgggggatgataaaggcacgctcagttttggagaaagctttgcccaaagctgcaattatacgtttacaagtcttgcggaaaaattaatcaaaaaagatgattccgttattgaaaacatggcggagaaactaggtctcacacagcgggcgggctgggaaggcaagctgtaccgggaagacggattcagacagctgtataatgaaaaaagcggggtcatttggggagatgacaaagacaaaaccgtaaaaaaagccgtcgcacagacggcgatcgggcaaaaaaacgtgaaagtcacgcctcttgaagtcgccaatatgatggcggcgatcgcgcgcggcggtgagaaaaaacaagtcaaaatcgcggacaaaattgaatacaaaaacaaaacgacgatggcgtcattcaaagaacagccgttaaaaggggaaaacatcgacaaatatacggcgcagcagcttcaaaaaattctcagagaagtcgtcacctcaccgaaaggaaccggccgaaggtttcaggatctgccgtatgagatagcaggcaaatcgggaactgcccagacgggaatgttcacaaaagaaaaacagacgctttaccacaaatggtttgcgggatactttcccgcggacaagccgaaatacgctctcgtggtgctgcacatggacacgccgggggataaggctctgacaaatacagtgttttatgatattgttaaaaaggtacatgaaaatgaaacaaatcagacatagaacaaccgctcagcccatgttaaaatatatgctgagcaagagggataaaggagtgcagaatgattgagcaataaacaatctcgttttgaaaaccgtgataagcgcagaaaagcaaatatggtgcttaacattttaattgctatcgtatctattcttattgtcgtcgttgcagtcagcctcttcatcaacagtccgtcgagcgacgtgagcgaaaaagcggacacgagccagaagcaggaaacacctgcatcaggcaagacgaagcagacatccgatgaagacataaaagacagcaaaaaagatacggcatcagacgatgacaaaaaagataaacaggataaggacacatctgattcatcttcagactctgacagcaaaaaagacgatgattcatcgaaaagtgatgacagcagcaaaaaagactctgattcaagcgatccttttaaaggcgcaaaaataacagagggcggctcatcaagcgatgttgagaaaacaattgttaacccaaaatggaaagcggtcggaacaaagcagacgggagaacatgcggcgacgtatgactcaagctctgaagactggtccgaaatgcttgacgccatctcttacgcaacaggcgtgtcaaaagatcacatgacagtgctgtggctcggaaacaatggaagcccgcaagatgcgaagggtaaagttttagacaaaacgaacggcaaaaagtatcaggtcaccatcacttggaaagacaaaaaaggctggaagccgacaaaagtagaaacgttaaaataaccgcaaaaaagcagctgattattcagctgcttttttctgtcatacgtcagctgaaaaatgcaccgacgcgctgtaaaggattctgccgtcaacggccgtcacctgatgggatacagaacggacgcgaagcataatcgcctggttgttttcaatctgaacgtttattttcttttcaagctcctgcaaagatgccgcttcgaaaaattctactttatctttgattaaatccaattgaaaattcatcagtacagatcctcctgatttttcttctgagtcaatgaaagtataagcctttctgccgtaattgcgcaataatcccaaagtattttagtacccttccattcttttttgtgataggataggaactgttccacgattaatccatactatactcataggaattataaattatggagagtgaaaaatatgggccgtgaatttattccattatttgaagattgggcagcgacttatgatgccacagtgcacggggcagacaaacaatacgctgatgtttttaaagggtatgacaatattcttgacagcatcgtcgcactttcgggttctaacgttttagagttcggaccgggcacagggaatttaacggcgaaattagccgccgcgaacaaaaaggtgtttggtgtagaaccgtctccgtcaatgagaaaactggcggctgacaagctttctgacaaagccgtgttcagtgacggagattttctggagtttcccgctccgccttttcaaatagataccatcgtcagctcgtacgcctttcatcatttaaccgatgaagaaaagcaagcggctgtaaagcaatatggcacaatccttcagaagcatgataaaatagtgtttgccgataccgtctttaaagatcatgaagcttatgatgaaacaattaaaaaagcaatccgaaacggctatcatcaattagcggacgatttaaagacggaacattatccgacactcgggacaatgaaaaacatcttttcagaagagggatttgccgcgcggtttacgcagcaaaatgactttgtctggataatggaggcgattaaacggtaaatcgaagggattgtgtataaatgaaactggcagtcatcggagcaatggaagaggaagttacgattttaagaagcaaactgaaagacgcaaaacaagagatgatcgctcactgtgagtttacgacgggcagctatgaaggcgtcgaagttatcttgctgaaatcggggatcggaaaagtcaacgccgcgatcagcacgacgcttctgcttgaccgtttcaaacctgattatgtgattaacacaggctcagcgggcggttttcatcatacattgaatgtaggcgacgtcgtcatctcaacagatgtccgccatcatgacgtggatgtgacggcgtttgactatgaatacggacaggtgccgggtcttccggcagcatacaaagctgatgaaaagctgatcagtattactgaggaagcggtttctgaactgaacggcattcaagtcgccaaaggcacaatcgctacgggagattcttttatgaatgatccgaagcgggttgaagacgtacgcgccaaatttgcggatttgtacgcggttgaaatggaagctgcggctgtcgcacaggtgtgccaccagttcaaaacgccttttgttgtcatcagagctttatctgatattgccggaaaagaatctgacgtttcatttgataaatttttagaacaggctgccgttcattcaactgagcttgtcctgaatgtcatcaaacgaattcactaagcgggggattctcgttctcctccgcttttccaggaggaggacatatattgaacgtgataacagatattacagaactgatcggaaatacaccgctgctccgtctcaagcattttgatataccggagggaacagcggtttatgctaaacttgagatgatgaatccgggcggaagcattaaagacaggctgggcggaatgctcattgaagatgcgctacgcacgggaaaggtgaaaccgggcggtgttatcatcgaagcgactgccggaaacaccgggatcggactcgctctgtgcgccagaaagcatcagcttcgcgccgttttttgcgtcccggagcatttcagcagagaaaagcagcaaattatgaaagctctcggagcggacatcgtgcatacgccgagagaagaaggtatgcagggagccattcgaaaagcgcttgaactggagagagagattaataattcttatgccgttctgcaatttaaaaaccgagtaaatccattgacttactataaaacgatcggacctgaaatatggaacgcgctcggcggggatatccacacctttgtcgcaggagcgggttccggcggcacctttgccggtacggcagcttatttaaaggagaaaaatcctgccgtcaaaacggtgatcgttgaaccggaaggctcgatcctgaacggaggagagccgcatgcccataaaacggaaggcatcggcatggagtttatccctgattatatggacgagaaccattttgacgccatttacacagtggaagacgatacggcgttttcgcttgtcagagaagcggccgagaaagaaggcctcttaatcggaagctcttcaggggcggctctttatgcagcgcttgaagaagcgaaaaaagcgcccgccggatcaaatatcgtcactattttccctgacggcagcgatcgatatataagcaaaaacatttttcaaggaggtcagtaagatgaagaaaaaaacgctgatggtgcacggaggaattacgggagatgaaaaaacaggagcggtttccgtaccgatttatcaagtaagcacgtaccggcagccgaaagcgggcgagcatacgggttatgaatattcaagaacggccaatccgacgcggacggcgcttgaaagcttaattgcggagcttgaaggcggcgcggcgggatatgcgttcggctcaggcatggctgcgattactgccgtcatgatgctgtttgacagcggcgatcatgttattttgacggatgatgtatacggcggcacttaccgggtgatgacaggtgtgctgaaccgcttcggtattgaagcggactttgttgatacgagcagtgaagaaaaagtcaaaaaggccattcgcccgaatacgaaagccatttatatcgaaacaccgacaaacccgctattgaaagtgactgacctcaaactgatgtctgacatcgcaaaagaagcgggcgtattgcttatcgtcgataatacattttacacgccgtatttccagcagccgctcagctttggcgcggacatcgtgctgcacagcgcgacaaaatatctcggcggccacagcgatgtcgtcggcggcttagttgtgacggctgataaagagctcggtgaaaagcttcattacgtgcaaaactcaacgggcggcgttttaggaccgcaggattcatggcttttaatgagaggcattaaaacactgggactcagaatggatgccatcaatcacagcgccgggaaaatcgccgagctgcttgaagcgcatgatgccgttcagacgctctactatccgggatcagcgaaacatccgggccatgagctgacaaaagcgcaaagctccggtttcggcggaatgatttcctttgatatcggcagcagtgaacgcgtcgacgcgtttttagaaaaattgaacctgtttacaatcgctgaaagcttaggagcggttgaaagcttaatctccgtgccgtccagaatgacgcacgcttcgattccgcgcgaccgccggcttgcgcttggcattaccgacgggcttgtacggatctcagtcggtattgaggatactgaggatttaacggcggatgtgaaacaggcgcttgattcccttttataaagaatggatagatttacattctctgtcggctgtcagcttgtattataatgttggtagactataaaactggcaggtgaccttatatggagaagaaaagactgaaatcattaatagaagattttaagcattacgcatttattctgcttgcagtcagcaccttcatttatatcggcgcggttcttcccggacaagggctgactgcgggccagaaaatgctgatgtttgtaacggattgtgcatttttagcgggcgcttatttctgcgttgaccgttcacttatttataaaaagaggctggaagaggccgaagaataaaaaaagccattgtcttttgacaatggctttttcatttcttattcagaaggggtttcgcgtaattcttttcccattccttttaaaaactgcagcccgaagccgagcgcgcggttaatatcaggatcaccgacggctttcatcagttcaaacatactgactttcctgtcctcttttaaaaatctttgcgcctggtccgtcccggccatggcgctttctaaaagtctgcccataaattcgggatcagcttttgacagcgcgcctcccgcggccatcatcgtattcaggagattggtgacaggttcccgggaaatctgtccgagtgcgattttggcaatctcctcttttgcctggagcatatagccggcggcatcaaaaatgcccaagccattcagctctgccataatggacatcgttttcgcgacggcttcttcattttctgcgagaagcgtcttcagttcttccagtttttcagctttcagctgttcctctgttttcgtttctttttgaatttcagtaattgggcttgccattatgtttcctcctttccttaatcagttaggtgcacatagcccggacggttccattttcgctgagcttccacaccgttttgcggatgacgttttttgttccgcggattcgttttcggaagcggcggtgtatcacaggaaccgagcacttccatgcggacttttgtctgtttataggcaggtgtatgtgtccgtgaatcatacgcaggcccggtcaggaaattaatcgcagaatctttatctgtagagttcatcggcagataaagctcatttgcgcggacacggtctgtcacaagcgcattcaatttaaccgccccaaaaggagagacgagccggatcattgttccgtcgcaaattccgcgttcagccgcgagctccggcgatacttcaacaaatacatccggaactttagactgaatgccttttgacttgtttgtcatgtttccttcgtggaaatgttcaagcatccgtccgttgttaatatgcaggtcatattcttcagggaatacggcaggctccacccaatcgctcagcgcaaaacgggcttttttgtccgggaagttaaagccgtcttcataaagaagcggagtgctctctcccgtaaagcttccccacaggaagctgttccagccgctaagaacgtcgtagcttgcttttccgaacagcggagaaaggctcgccatttctgagaaaatgtcgcttggatgcgtgtaattccaatcagcgcctaaacgattggcaacctcctgaataatccaccagtcgggtttggcatcgccgagtgtcggaagcgcctgatacaatctttgtacacgacgctctgtgtttgtaaatgttccgtctttttcaagagatggaaccgcaggcaggatgacatccgcgtattgcgccgttcttgaaaggaaaatatcctgtacaacaaagaaatcaaggctggataaaatgtcatgaacatggttggcgtttgaatcgacgagcgccatatcttcaccgacgagatacatggctttcatgtttccttcttcaatcgcatggagcatttcaatattatcaagacccggcttgccgtcaatttcaacaccgtaagctttttcgaatttagcgcgtgccgcatcatcggtaatatgctgataccccggaagccagcctggaagagttcccatatcgcaagcgccttgaacgttgttatgtccccgcagcggataagctccggcgcccggacggcggtagtttcctgtggcaagcagcaggttggaaatcgccgctgatgtatcagagccgcctgtattctgggtaacgcccatgccccaaagaacacaagtgccgtctgcatcacgaatcatttcggcaatgcggatgatcgtatcctgagaaagtccggtgatgcgctccgcatattctaatgtatactttttcagcgtttctttataatcttcaaagtagttgacattctcatcaataaacgcttgatcgtgccagccttggtcaatcatatattttgtcactgccatgagccagacttggtcagtcccttgtttcgggctgataaagaggtcggaccgttcagccatttcatttctgcgcagatcggcaacaattaatttttgtccgtgcagcttatgtgcacgtttcacgcgtgtggccagaaccggatgtccttctgccggattggcgccgacgatgagcacgaggcccgcttttgcgatatctttaattgtgccggcgtcaccgcccataccgactgtgcggaataagccgtccgttgccggtgactggcagtagcgtgaacagttatccacgttgttggtttcaaatacttgacgcgctaatttttgaataacgtagttgtcttcattcgtaattttagaagaagaaataaaaccgacagaaccatttccgtgttcggccttgatcgaaccgagtcttgaagcgacaagatcaagagcttcttcccatgacgattcaacaaatgcgccgtttttccggataagcggttttgtaatccgttcttccgaatttacgaagtcccagccgaatttccctttcacacaagtggaaatcgcattaaccggagcatcggaaacaggctgaattttaaggatgtcacggccttttgtccatacttcaaaagagcatccgacgccgcagaacgtgcagactgtttttgtttttttcgtccgtttatcgcgcatagccgcttccacttctgacacggcgaagatgcttgtatagtcgggttcaacatttttcactaaatcaatcatcggttccatgacatcttcttttattcctgtcataaatccggcttggccgagcattgatttttccatcagtgcgttacaagggcagacagtgacacattggccgcagctgacgcaggatgattcattaatggggacgccttcatcccaaatgacccgcgggcggtcgcgctcccaatcaattgaaagggtctcattcacctgaaggttttgacacacttccacacattggccgcaggcaatgcattggttcggatcatagcggtaaaacgggtgagacatatcaaccgcgcactttgaatcatctttcggcgtatacggatatttctgatgctcaattcccatcatttccgctgtattatgcagtgtgcagttgccgttgttgttatcgcataccgtacagtaaagcaggtgattctcgagcaggcggtccatggcctctgtctgagcctcttttacccttcccgacgtaagcgagatggacatcccgttttctgcagccgtggaacaagagcgctgcaatttcccgtttacttcaacaatacaggtgtcacatgtttgaatcggatctacttccggtacatggcatatttgcggaatctcaattccgttttggtttaaaatatctaaaatcttagacccctctggtgcttcatactccgtgccgtcaattttgacacggatagactgaacgtctgtcacttccaattcccctccatcttttaaactcgaaaaaaagccatgcacatagataccggcctcctgtccggagaacggtataaatacgcatggcggaatagttcactagcaagtcttactaacagaccaatcctatttgtataaaacgatagactcataacacgtttcctattacaaatccatcttcactgcttttattataaggtgatatttattataatacaatacgaaaggaaaactttaaccaggtgaaatgtcacaaaggggaaccgggaatgtctttcataggctaaaatcggaggggacaatatgtctaaaaaaattcatgaatttaacgatattatccggaaattgcgcaaagaattatttggaaaggggccggaacgaattcacaccgtttttgtggataacatggcggtatcaacgctttacggcaatctaagcgcaagtgagcagtttatcgcacgcacgcctgaaggaagagaaatggttcatgcggcgcggaccagcttaattcaggaactgtattcaaaacaaacgcctgacggaatggaagagctcatcggagcaaagctcgtgcatctgttttcagacatcaagatcgaagagaatattgcggtgtctgtatttgtctttgaccgaacaattgaagagcgccgtgaagaaatcaaaagctgaaaaaaattcaattgacacgaaattgtcacatttgatatgatatgaactgcctgcagtggcttaaggacgaattttatggaatgtgtgcatgatctgtacattttctatagctgatattttcattctgcttgatattgttgtatgggtatgcatacaagttaggcagcattcaaacccgttttagacgggctgtttgaatgctgccttttttgttaggcgtctttggaaactgcggggctgaaatgataaatggaggggttattatggcttttcgtaaaccggacgaaatagcggagcttgcggtcgaatcaggggtaaaaaaggtgcattcaccgctttcagcactgattgtattaggatttttgggaggagcgtttatcgcactcggttatttgcttgatatccgtgtcatcggcgaccttccgaaagaatggggaagcttgtcgagtttaatcggggcgtccgtgtttcccatcggattggtgctcgtcgttcttgccggcgcggagctgattacgggtaatatgatgtcggtatctatggcgcttttttccagaagaatatccgccggtgcattagtgaaaaattgggtgatcgtgacgttgatgaatcttgtcggcgcactgtttgtcgcttactttttcggacatgttgtcggattaaccgaaacaggaccttacttggaaaaaacgattgcggtcgcacaaggcaaattggatatgccgtttggaaaagttattgtttcggcgatcggctgtaactggcttgtctgtttggccgtctggctttctttcggcgcagaagacggagccggaaaaatcgcgggtatatggtttccgattatggcgtttgtcgcgattggttttcagcacgttgtagccaatatgtttatcatcccggctgcgatttttgcaggttctttttcgtggggtgatctgattggcaatctcattccggcctttatcgggaatgtaatcggcggggcagtgtttgtcggccttatttattttattgcatattcaaaaaaagatcagaaaaagcaagggatgaaaagagtttcctgaggtaagaaagatgccggaaaacaaggacaattgaagcggaatgccagcacattttccgtccaaatcttgaaaaaaatgtttacaaaatggaagctgatggatatacttacaaagtaagaaaaaagcaaagggaggttgaatcacatgacgactttaaacggcaatcaaaatttacaattgaaccgattcagcctgtggaagagttcgtgtccttccttaacctctgcccgtcaagcacgttaatttcggagtatcaggacattcgcagctccccgcagggaaagaagcacgtcttcttttgtctgcggatttagtctgcccgcagcgcatatgaagtttgctgcgggttattttcgcttgtgcggatattgaaagggggtgagcgataatgaccattaatcttttctttttaacactgaccatttcaaagcgttttaaaagtgcggaagagtatgaacgagaacagcaggtcgaagagttttataatgaagcgaaagaacgccagctgaaacacttttatatgaactgaacggacacgaagggccaaaacggaggagaaggaggagatcatcatgttcagaattgaactgctgaatcattacacaatggagaaggaccaggtttagcgaggatgttgctgtcacgtcgcagacggcctgcataccatggtaaagaaagaaaaattggtaagcgggtgatagcatgcaaggcggtcagaacagaattccatccatcgggcacgggtatgcgtcaatgccccattcatttaaacacggctacggcaacccgtatcgccggcagagaatggcggcgctttcccggcagacaagatatatagcaccgtattattggtactagagcaggcggaaaacctacgttttccgtcttttttttatgaaaacaaatataaatttcaaataaatcgaaacgttcatgaagagaagtgcgtctagttagtacctcatactaatacgaggtaatattatttctgaataataaatcacaggaatggaaaagcgggtgttatacaatgttgcaacatacatcttcagcattaaaacgaatgcgcgcgaaatactttgctgcatcagaactggcagagtcagtcattcagcaaatcttgatggacatacaggaatacgaccgcattttggaaatcgggaccggaaacggctcaatgtttaaacaaatcatcggacagcttgaaaagggcagtcttaaaagcatagaaacatcgaaacgtaaaatacggaaaacacagcgcgcaaaccgttcggttataaaagccgggcgcggaaacattcagcaggggaggcctgaaagcttaccgttccgcgatcgcagctttcataaagttttctcattacatactgctgaaacagtcagcgattacaggacagcatgtaaagaagtgtaccgcgttcttcaaattgacgggtgtttctatatggttttgaaaccttcgcggatgagtgagaaggatgtgattgaggtgctctatgatcagcatttcagagacatttcagttgtcagcagagattcattccattttattactgccattaaatagaatatttcttgggaaataaaaagagctgcttaagtcactgcagctctttttgtgaaattgggcatatttccttatttttggttatttcacatctattttatattaaaaaaagtttttttcttatacaatggtaatcagatgaccgtacattttaaatgttttgaacaaacggaatgaatattcattccgcatctggaaagggggatgaaatgacagcttcaaacaaggttgaactcattatgaaagcgtcgcttactttgtttacagatagaggatttgacgcaacgacgattccgatgattgccgctcaggccgatgtcggaaccggcacaatctaccgttactttgacagtaaagagacacttgtgaacgtactgtatcaggaaagtgcgcagcgttttatgaaaaaagtcaaaacggactttcagggtatctctgtaagagaagggtttcatcacctgttttattgtctgattgattttacgaaggaaagtgagtatgcattgttttttcttgaaacgaataaggacgcctactttctgaatgaaacgagccgtaagcttcttgatgaaataacacagatgcttgacgtcttttttcagcgcggcaagtctgaaggtgtgctccgcaatctgccgtccaatgtgctgatggcgctgctgctcggggcatatctcaaactctatcagcttatccggacgggaagcgtcgaaataacaaaaccgtttctgaaagaattggaacaatgttcttgggatgccatcagaactcattaactattcgccgaaggaaggaagatcgatatgaaacagctaagcgctataccgcagccgaaaacatacggacctctgaaaaatctccctcacttggaaaaagaaaaactgtcacaatcgctctggaaaattgccgaagaatacggcccgatctttcgtttcgaatttccgagctctgtcggggtcttcgtctcaggccgcgagctcgcggcagaagtctgtgatgaaaagcgatttgataaaaacctcagcaaagccttgctgaaagtccgtgagtttggcggtgacggactatttacgagctggactcacgaaaagaattggcagaaagcgcatcggattttattgccgagcttcagccagaaggcgatgaaaggctatcattcaatgatgcttgatattgccatgcagcttgtgcagaagtggagcagattaaatccgaatgaagaaattgacgttgccgaagatatgacgcgcctgacgctggatacaatcggcctgtgcggatttcattaccgctttaacagcttttaccgcgacacacagcatccttttatcacaagtatgcttcgcgcgctgcaggaggcaatgcgccaatcacagagacacagcctgcaggacaagctgatgatcaaaacgagacatcagttccagcaggatattgaagtgatgaatgaactcgtagaccggatcatcgctgagcggagggaaaatccggatgagaatctgtctgatcttttagcattgatgcttgaagcgaaagatcctgtaacgggtgaaaggctggatgatgaaaatatccgctatcaaatcattacctttttgatcgcggggcatgaaaccacaagcggactgctttcattcgcgatttactgcctgctgaaaaataaagataaattgaaaaaagccgttcaggaagccgagcgggtgctgacgggagagacacctgaatataagcagattcagcagctgacatatacccgcatggtgttgaacgagactttacggctgtatccgactgccccggcattttccctgtacgcgaaagaagatacggttctcggcgggaaatatccgattgcgaaaggacagccggtgacgattctgactccgcagcttcaccgggataaaagcgcgtggggagaagatgccgagctattccgtccggaaaggttcagcgatcccgcggcaattccggctgatgcgtataagccgttcggaaacggacagcgcgcatgcatcgggatgcagtttgccctgcaggaagcgacaatggtgctcggccttgtccttaaacactttgaactgattgatcatactgattatgagcttacgattaaagaagctttaaccattaagcccggtgattttaaaatccgtgtaaaaaacaaggacgtgtccaatcatcagcccgtacaaaaccataaagctgaaggcggcggtcacaaagaagaaacgaaagaaatcccgtcccacggaacgccgcttctcattctttacggatcaaatttaggaactgcggaaggaatcgcggaagagctggctgacatcggcagaagcaaaggattttcaactgaaaccggcccgctcgatgattatgccgggaaactgcctgtaaaaggcgcagtcgttattgtgacggcttcttataacggggcgccgcctgataatgcggcgggttttgtgaaatggatggaaacccttgaagatcaggaattaaagggtgtttcttacgccgtcttcggctgcggagaccgtaactgggccgccacttaccagagggtaccccgcctgatagacaaagtgcttgaagaaaaaggggcaaaacggctgacttctatcggggagggcgacaatgccgatgattttgagtacagtcaggaagcctgggaagactcattctggaaggacatcatgaaggcttttcatatagaggccgctccaaaacaggcaaacaaatcacagttatcaatcgaatacgtaagtgaagcagccgagacgccgattgccaaaacgtacaaagcatttgaggcggaagtcatcacaaacaaagagcttcataccgaaagcagcaagcgttcagtccggcatattgagctgcgtctcccgaagaccgaaacgtatcgggaaggagaccatctcggggtgcttccgcaaaacagcggggaactgatcagccgtgtcattcgccgattcggtctcgacccaaatcagcactttaagatcaagggccggcagctgcctcatctgccgatggaccggccggttaatgcgccggagcttttggcgtcatatgtagagctgcaggaaccggcaacgagagcccagcttcgcgaacttgccgcccataccgtgtgcccgccgcaccaaaaagaattggagcatctttattctgacgatgcggcatataaagaaaacgtgctgaaaaaacgaatgaccatgctggacctgctggaagattatccggcgtgtgaactgccgtttgagcgctttttagaacttctgccgtccttaaaggcgcgctattattcaatctcaagctcaccgaaggcaaacaaaagggagctcagtatcacggtcggcgttgtgacggctccggcgtggagcggccggggagaatacaagggcgtggcttcgaactatttagccggattacaaaatggcgattctgccgtctgtttcatccgctcgccgcagtcgggtttcgcattgcccgaaattacgaaaacgcctctcattatgatcggagcaggcaccggaattgcaccgttcaggggatttatccaggcgcgggctgcagaaaaaatgtccggtaacagcctgggcgaagctcatttatacttcggctgcagacaccctgaagaagacgatctgtacaaagatgaattcgaccatgcggagaaaaacggccttgtcaccgtgcatcgggcgtattccagattagatcaggactgtaaagtttacgtacaggatgtcctgcttcgcgaggctgcacagattattgcgcttcttgaccaaggcggccatctctatatatgcggagacggaagcaaaatggctccggctgtcgaaaatgtactgcttcaggcgtatgaaaaggtgcataacactgattcaaaagtttcctcgaattggcttgaacagctgcaggcggaaggaagatatgcgaaagatgtttgggcaggtgtgtaacagaagcgtaaggcaattgaagattgtgttttaattgaagaaagccggcacgatatttgaaatctactgaatcaaaaggaatagttatagggagtatcgtgccggccttatctttagtatcggacaaaagacacaaatctttaatgtttttattgatttacatgcaggcggctatgtcccttttttctgaattccgccagaaataaaaccggataagacagcaatagcaaaaccgaaataaatgaaatgataccgatccaatgaaaatgcgtccaaaagaaaccgccgcaagacccggccgcgcttgacccgatatagtatgcaagcagatataatgaagaagcttgcgcgcgctgatcaccggctgctcggccgacccaggcgcttgcaattgaatgtgcgccgaaaaagccgaaggtaaacacggcaatgcccgcaattttaagggcaagctggggcaaaagtgtcaccgctgcgccggcaagcataacaaaaatcgcaatcttaatcatttttgcacttccgaaaagatctgcttttttccccatatagacagagctgaacgttcccgcgagatagacaataaaaataaaaccgattacagtctgtgacaaatgataaggagccgccattaaatgaaagccgatataattatataatgtcacaaaactccccattaatataaatcccagagatattaacaaaagcagccgtttgcggtgtagaaccgctccgtattccttacatgccgcttttacgcccgcatgccgctgagatgaatggcgcggagccggaagaaaacgccaaaacaaatagcttaatataatagaaagaatgccgataatggcaagcgccggccgccagccgaatacatcagtcagaagccccgttaacagcctgccgctcattcccccgatgcttgtgccgctgatatacaggcccatcattttcccgaggcccttcggatcaaactcctcgcctacatatgtcatagcgacagcaggaacgcctgccagaaaaataccgagcagccccctcatcgccaaaagcgccggaaaagccggactgaacgctgttaatagacctaaaacagaagtggctgttaacgacagcaccattaatttttttctgccgaatccgtcagacaacgaagcagcggccaataatgaaaatgccaaaacggctgttgagatggataaagttaagctggcagccgcagcggaaatatgaaactcttccgaaaacaaaggcataagcggctgtgtcgtgtaaagcgtggcaaatgtcacaaagccgctgataaacagtgccaagctggcctttctgtaagcctttgtatgaggctgaataaacgtcatgaatgtccctcttttctcactgttggttatatatgtatcgtacgcttttcatttcaatgtgtctaatttataataactatagaattaatgcgtgtaggttatgaagaaaggggagaaggagaaaatggagcttcatcaaattgacaacttcattgcggcggcaactcatcagcatttcacaaatgcggcaaaagaaagaatgatttctcagccggcattaagccgatcgattatcaggctcgaagaagaattaggcgcgccgttattttacagagagacaaaagccgtccggctgacaaggcacggagagcagttcttaataaaagcaaaacaagcgagacgagctttaaatgaaggcgttgaacaagtgaaaaaaaatatgagcctggagcacggcgaaatatctgtatcttttcttcatacgctcgggttgcgcttgatgcctcagctgattgccgaatttaaaaagctatacccaaacgtgaccttccggctgtatcaaggcgcaaatgaaacgcttcgcaaaatggtggaaacgggagatgcggatatctgtctcagctccccgccgcttcccagcgagcttttacaatggacagtgctggagaaagagcctctttatgcggtgcttcctgagaaccacccgcttgcagaaaataaaagcattcaaatgaaagagatgcaggacgaggattttgtcggatttaaaccgggatacgggctgagatatatgtttgatctgatgtgccgggatttgaatatacacccgcatctcgcatttgaaggagaggaagtgtcaaccatattagggctgaccgccgcgggtcttggggctgcagtgctgccgaaaaccgcggagcattcatactttccggtcgtttttctcccggttgcagattaccaatgcgaacgcaccatagcgttagcccagttaaaaaaccatgctctctctcccgctgctgagcgttttaaacagtttgcacttgattattacaaagcacgcaactgagcggtcattttattaaaatcgaagttgaaaataaagcagaaagaaatacagaaaacggaggataaccatggcgaaaaaaacagtgaaaacaaatgctgtccgtatcattgagcagcaaaacattccctatgagctattaggttacaaaacagaagggggacagcccgcagacggtctttccgtttcacaaaaaatcggatactctgccgaatatgtttataaaaccttagtggcatctgcaggaactgatcgttattacgtctttgtcgttcccgttgcaaaagaactgaatctgaaaaaggctgcgaaggcggcaggtgagaagaaaatagaaatgattgccatgaaggaccttttgggagtgaccggctatatacgcggcggctgctctccgatcggaatgaaaaaaaggtttcctacttttattgatagatccgctgaaacactggcgtttatgattgtcagtgcggggaaaatcggaatgcagctaaaagtagcgcctcatgatttagccgaagcaagcggggcggtatttacagacattgtataaatgtccggtggatctaatggaatacacgtttcaagggagaatgataatgaaaaaaagatatgaaaacttgaatggcgtgaagaatgaacatggattcatggacatgtggaaatggatgaaagaacgaagagaaaaaagtaaagatttaagcgagaatattccgaaagcggtcacaagggatgtccgtgatgttgccgtcaatcggacggaaaccgccataacatggatcggccattcttcatttctgatccaaatacaggggcttaacataatgaccgaccctgtatgggcgcggaggatgggttttcaaaaacggctgacagagccgggatatgaattgagcgaactgcctgacattgatgccgtgctcatctcacatgggcattatgaccatcttgattttccgagtataaaaaaactgagaggaaacccggatttttacgtgcctgcgggattgaaaaagctgttcatcaaaaaaggccgcaaaaaggttcatgaaatgaattggtggggtcgttttgagatgcggggggtgaatatatcatttgttccggcccagcactggacccggagaacgctttgggataccgatacttctcattggggaggctgggtcatagaaagcgaaaacggcgagtccatctattttgcaggagatacaggctattttgaaggctttaaagaaatcggagagaggtttcgtattaaggcggccctgatgccgatcggagcatacgaacccgaatggtttatgaaagtgtcacatatcaatccggaagacgccgtgaaagcttttttagagctgaaggctgacagcttcattcccatgcattacggggcattccggcttgctgatgatacaggcccggaagcattaagcagactgcacggtgagtgggaccggcttgcattacctcctgaaaacctgagagcattagcgcttggcgaaacattttggctgtaacagcaggttttcgctgccgacaccaatcgtttaaaaacggttggtgttttgttgtcaaccaaaggtgaacagcctcagtataaaacatgatttttccggaatctgcggtaaaaaacaaaactttttactcttttgtttcactatacaatgaaaacggtttcgtatgcgcggtatatttaacctatcacaattgctccagcagaaacggacaggaaggatagaaaaacagatgaaatacatgaattcaagacagaaaaagattttgtatctgttgttatctgaacctgatgactacttagttgtgcaagatttcgcagacagggtccgctgttctgaaaaaacgatcaggaatgatttgaaaacgattgaagatttcctgaatgaacatgctcaagctcagctgatccgtaaaccgggattaggcgtctatttacatatatctgaacaggaaagatcacggttaagccggcacatttataatgagcactttacatgcaggcacaagaccgatgaagaaagaatacttcacatcgcttatgatttattaatgaattcaaagcccgtttccgcaaaagaaattgccgcacagcattttgtaaacagagcttccattaaaaaggatatcagtgcggttgaagagtggctgaagcgatttgatctcacactggtttctaaacagcggctcggcttaaagattgaaggggacgaaaaaaacaaaagaaaagcattggcgcgaatttcagatttgattgataatgcggagtttacaagccaatttataaaaagtaagtttttaagtcatgaagcggactttgtgagaaaagaaatcaagttattacaaaaaaaccattctatctattttacggatgaaacatttgaaagtttgctgctgcatacattgctgaccatccgccgtatcaaaatgaaacagccggtcgccatctctgcaaggcagctggaggcggtaaaaaagaagaaagaatatgaatggacactggcttgtttaaaacggcttgagccggtatttgccatccggtttcccgaggaagaagccgtctatttaactttacatataataggcgggaaagtgcgctatccattgcagcaagaaaagaagcttgatcttgaagattctgagctttccaaagtcgtcaggcatttgatcaatcgcgtttcagaactgaaaatgctggatttccataaagaccaggaattgatcaatggattgaacattcatctcgatccggtgttgaagcggctgagctatgatctctctgtttcaaaccccatgctccacgacatcaaaaaaatgtatccttatttgtttcatcttatcattgacgttttagaagacatcaatcaaacatttgatctttatattcctgaagaagaggcggcctatttgaccctgcattttcaggcagcgatcgaacggctgcgccgaagcagtcataaccctaaaaggacgatcatcgtctgccatatgggcattggcatgtcgcaattgctgcggactaaaattgaacgcaaatttcatcacattacgataaaagactgtatcgcaaaagcggaactgacagagtatatcaaaaagcataaagatatagatttcgtcatttctacgatagggcttggaaatgtaacgatccctcatatcgtcgtatcaccgcttttggagcctgctgatgaaaagaagctcagcgcatttatgcaacagcttgatacatcacaccgccgggagcaaaaaacgtttaaaatgctgaatgatacgactccgtttctcgtttttttacagcaagagacagagcaccgttatcaggtcattgaaaagctggcgcaggctttgtatgaaaaaggctatgtagaaaaagagtatggcattcatgcagtaatgagagaaaaaatgtcggcgacaaatatcggggcgggtattgccatccctcacgcgaactctaaatatatcaaacaatcagccattgcaatcgccaccttaaaagagcccattgagtgggggacggaaaaggtgtcgcttgtatttatgcttgccgtcaaacacgaagatcaaaacaaggtaaagcaattattcagtgagctttcctatcttagcgagcagccggcatttattcaaaaactgacggaagaaaaaaatgtgatgacgtttttatcgtatttaaactattaaaagcaggggatggctccctgctttttttctgtttatagggaaaaatgccgttatttccggaacttatggtaaaaaaacgcgcttatcacaggctgatttcagtataaagttgagacaagatcttgaaattcagactgcaaaggaggatttatatgaaactgttagcgattacatcatgtccgaacggcattgcccatacgtatatggctgctgaaaatttacaaaaagcagccggcagattaggcgttgagatcaaagtggaaacccagggcggaatcggggtggaaaataggctgaccgaagaggaaatccgggaagcagacgcaatcattatcgcggcggaccgttcggtgaacaaagaccgattcgcgggaaaaaagctgctggccgtcggggttcaggaaggcatccgcaaaccggaagaattaattcaaagagcgcttagcggtgaagtgccggtctatcaatctgcttcaaaaactgaatccgcaagtcagcagggcaaaaaacaaaacccgatttaccgtcatttaatgaacggcgtttcttttatggttcctttcattgtcgtcggcggattattgatagcggttgcattgacgcttggaggagaaaaaacaccaaagggcttagtcattccggatgcgtctttttggaaaacgattgaacagatcggcagcgcttctttttcattcatgatcccgattttagccgggtacatcgcgttcagcatcgccgataagccgggtcttgtccccggaatgatcggcggatatattgcggcatccggcagcttttacgacagtgcgagcggcgcaggatttcttggaggaatcattgcgggatttttggcgggatatgcggcgcttggaatcaaaaaatgtaaagttcctaaagcaatacagccgattatgccgatcattattattccggtgtttgcctcactgatcgtcggtttggcgtttgtatttctgatcggcgcccccgtcgctcatattttcgcatcattaacggtttggcttgcgggaatgaaaggctcgagctcaattctcctggcattgattttaggagcgatgatctcctttgatatgggaggacccgtaaacaaggtggcctttctattcggatcggcaatgatcggagaaggaaattatgaaattatgggcccgattgccgtttccatttgtataccgccgatagggcttgggattgcgacgtttttaggaaaaagaaaattcgccgccgcagaaaaagaaatgggaaaagcgtcatttacgatgggccttttcggtatcacggaaggagccattccatttgcggcccaagatccccttcgtgtgatcccgagtattatggcgggttctatgaccggctcggtgatagcgatgatcggccatgtgggggacagagtggcacacggcggccccatcgttgctgtacttggagcagtagatcatgtattgatgttttttatcgctgtaacagcaggctctcttgtcaccgctctgttggttaatgtactgaagaaagatatggcgaaatcccccgcgcccggtgaggtgctgccgtctgccgcaccaaatgaagctgcagcggcaaaagaaacaaaggaaccatctcaggctgacagccgaaaagccgggatgaccgaaatcaaaaaactgactgacattatcagcacggacttgattgaaccgcatttatccggcgaaacgagggatgacattatcgatgaaatgatcgagaaattgtcccgtaaaggtatgcttctgtctgacagcggatttaaacaggccattttgagccgtgaacagcagggaaccacggcgataggtatgaatatcgccattccgcacggaaagtctgatgccgtcagaacgccgggtgtcgcattcggaataagacgttcgggtgttgactggaacagccttgatggttctgatgcaaaactgatttttatgattgccgtaccgaaggaaagcggcggaaatcagcatctgaaaatattgcagatgttatcccgaaaactgatggatgacagctatcgggaaaggctgctctccgttcagacaaaagaagaggcgtatgggcttctggaagaaatcgaataaagcgggggatgatcatgtctactgaaccgatatttttcaatccggttttcaaagaaagaatttggggaggcgccgccctgcgtgatttccactataatattccgtccgagcggacaggggagtgctgggcctttgccgctcatcaaaatggacagagcacagttcgaaacggcatgtataaaggatgtacgctcggtgaattgtgggagcatcacagagatttattcggaaaccttgaaggagaccgttttcctcttcttacaaaaattttggatgcggaccaagatctgtccgttcaggtgcatccggatgatgactttgccaaaatgcatgaaaacggggaacttggaaaaaccgaatgctggtatatcattgattgtgaaaaagatgcggagatcattttcggccacagcgcaacaacaaaagaagaactgatatccatgattgagcgcggagaatgggacggacttctgaacagagttaaggtaaagccgggagatttcttctttgtcccaagcggcaccgttcacgcgattggaaagggcacacttattttagagacgcagcaaaattcagatacgacttacagattgtatgattacggaagaaaagatgcggacggcaggctgcgcgagctccatttggaaaaaagtatagaagtgacagacgttccatctgtccgtgaacggccgaccgttcaatataaacaaacagatgatctgctggcagctgttttaatagaatgtccttatttttcagtcgaaaagtgggatgtaaaaggtgaagcgaatttattccagaatcatcccttccttcttgtcagcgtgatcgaaggagacggaataataattgcaggcgggcatgaacatccctttagaaaaggagatcacattctcctgccttccggtttgggagaatataaactggcgggccatgcaaagtgtattgtgtctcatctgtaatcttcaaaacccttctctggcagcagagaagggtttttcatcacttttacaaaaaggccgaaatttccgtggtccgttcctgaatttaatctctcaatttgtatatctcccgagccattgattcaagtatgtacatagcggggatttgggtggtgatattcgcattttcaacccattcttccgtcacgtaatatgaaatattcacatcagacattttggcaatggttgaatgtttatgatttgtaatactgatgacccggcttccttcttgtttcagctgattcagatgagtcaccgtagaatctccttcacctgaaaccgataatgcgatcgtgatgctgttatggcggaaatgggaatgggccggaaagtaaggatctttaatatacattgaaagtttccctaagcacgaaaaatatctggctccgtattcggcgagaattcctgaactacccactccgataaaaatgacgctttctgcatcggctgcaagggctgctgcttccttcagcttttcttccatccctccgcttactgttctttcaaaaaactcggcaacggaatgatggggactctttaaaatcgtttttttatttgcctccgcatacattttcagcttcaccttaaactccgaaaacccttcacagtttatttttttgcagaaacgtaaaatagaagccgtcgatacatgggtttcatttgccaattcacggattcgcatatagacgactttctcgctgttttgggagatgtagttgtataaagaagtttcaagctcgttaaatgaagcaatcatttcgtgtgtgaacatgcagggggattctcctttttatgagaatggtgaatgtacatctcatcgtaacatatcatttttaaaagaaacatagtgttatatttatgtgacaaatcactttttgtgtcattcaaaacaagacgtcagccaatgatttacggtgcaaaacaactgcggatataattcgttcatacgcttatgcatgatctcttcaagggtctctgacaaaagcggtcgaaaaaaggaggacaatatgagtatcaaactgatagcggttgatatggacggaacgtttttgaatgatgaaatggcatataacaaagagcgttttatgaatcagtatcgtgaattaaaagcgcggggaattaaatttgccgtagcaagcggaaaccaatatgcgcagcttacatccttctttccggaaatcaaaagtgaaatcgctttcgttgccgagaatggcgctttcgtcgtgaatgccggagaagaattattcgcgggtaacatgtctgaagacactataaaagaggtgatccgtgctttagagcagtatgaggtgaaaaacgtcattgtctgcggaaaaaaaagcgcgtatattcatgaaaatgccagtgaggatgaatatctgcatgccagtaagtattattatgtgttaaaaagggtgccgcattttgaaaacatcgatgatgacattttaaaattttccatcagttttcccgccgaacattgttccgcacttctgaggcatttaaaagacgccatcgggtctttcgtcacgcctgtatcaagcgggcacggtgacatagatctgatcataccggggcttcataaagcaagcgggattaggcttctccagaaacaatgggggataaatgatgaagaatgtgcggccttcggagacagcggcaatgatttggagatggtgtctgccgtgaaatacggagtcgctatggataatgcgcaggaaagcattaaacaggccgcggcgcatatcgcgcaatcaaacaatgaggaaggggtcttaaacgcgattgattccattctcaaatgtgaaaaaccctttgtctgaaaaagacattttaactgcggaggtgctgaacgatgattaaattagtgattacggatttagacggcacatttttaaataatcaaggcgattttgacagaacgttatttgaaaagacaaaacgagtaatggaagaacagcatgtcgctttcgccatctgcaccgggaaacagtgtgaaagggtggaagccttattcggagaagacgcgaaagatttttggattttaggagacagtgccgcacgtatgaaaaagaacggcaaattcgtatatgaatctttgatcagcaataaagccggactgtcaattataggcgctttagaaaaaatcagctgcgggcacaccattatcgcgtgcacaaaaaaaggcgcgatcgtaaaagaaaatctgtctgaaagtgaaatgaaatatgtaaatgcctcttatgcacatgtaacgaaaataactgattttactgagataaaagacgattttatcaagattacggttcatgaccccgacgccaactgtccggaaacgagagaaaagctgcatgaattttttcaccaattatatatcgtagcatcagaagatacctggatggacatatcaaatatcggaatacataaaggatcaacagtacaagaactgcagcgattattaggggtttcggctgatgaaacaatggcattcggagacggccgcaatgacaaagaattgatggaagcggcttcctacagctttgcggttaagaacgccattgacgaaataaaagatgcggcgcactttgtcatcaaatcaaatgacgaaagcagcgtcatgcacacgattatgagaatattagcgctgcaaaaacaatgagaaagcagatgggctaaagccaatgcggcaggacttactaggaaaagaaaaagcgggctatcctccgactttaaatcactcctgattttccgaaaatatgttaaaaatgaataaatatctatatttgacccaattgtattggtataatatgtataaaatgaatgaaacggcgtaatatcaagatgaaataaatcacttcatatcatttgatatcagacaaaaagtaggaacttcctcgttttgaaattgggaggtgtttgtattagcccgctgttgagtcccgcgtatatcattctcatttttcttccagcagcttcttttctgttagggattttaggatatttcatcttcaaaaaagtatggatgatggttgttattgtattcattttgtccttgatatttatgtttattgtaataggtgccgaaccgacatttttcatttgggtggctatgatgacggggagctgttttatctccggttcaatcactaagacggtatggacttttgtaaagcgaaaatattagacacagaagaatcctgtttgaacagctatccttttttgccgattgaagaaaaggaagtatagagtgatctgttatgttcttatattttgtctgttattgtattgtctgtgtatcgttttgttcttttttaactaaacggagcgctataattgaactgcagatatatagaaacacaaaaaaggataaggaggatttttatgtttcaaaccttagaccattttttgaaatcttgggaattcgaagccgatgcgacacaaaaactgctgaatcatctgactgatgaatcacttaaacaagaaatcacttcacaacattggactttaggccgtattgcatggcatactgtcgcggccattcatatcattacctcgaacacagatttaacgttccacgctccggctgaagattatcctgttcctgcatcggcgcggtttattgctgagagttatcatcaagccagtaatgcatttgtgcaggcgttaaaaacgcaatggactgacgatacacttcaagaatgtgtcaactttattggtcagcaattgccgaatggttcacttttgatgtttttaattcaacatcaaaaccatcatcgaggacaaatgactgtccttatgagacaagcaggtttacctgttccgggtatttatggtccggcaaaagaggaatggacaacatttggtttggaagctccgaaataggatgttgttgtaagggctcgaacgaatagatgataccaatcaatgttggtatcttttttgtattagtcttcgtgacatgcagacgaatcaacagttcaaaaggtgtaaagtgagttcaataactgcagaaaggcgattatgatgataactaaaatgactcaattcaatatgaaagacttcaataaaccaaacgaacctttcgttgtttcagggagaatcatcccttcatttgaaaacaatgtttggacatatacagaggagaaatttgctgaaccttatgtcaaaaaatatgacgatgaagacattgatgtcagttatgctgaagaagaggataaagttgtctttttttattacgcagagaacgactgtgtcggccggagtaagcttcgttctaattggaatggatacgcactgattgaagacattgccgttgcaaaagattatagaaaaaatggtgtcgggacggctttattacataaagcgattgagtgggcaaaggagaatcatttatgcggtcttatgcttgaaacacaagatattaatgtttcagcttgtcatttttatgccaaaaataactttgtcataggagcggtcgatacaatgctttattccaatttttcaacagcaaatgaaattgcggttttttggtactgtaaattttaaatataacagtatttgatgtttcgtcatttagcgggtgtgtgccgcaaagtattcaaaacatcggcttgaggatttataataaggtatatcaatcaatgcagggggagttatgtatgaagtgcaaaaaaatgaacagggtacaattaaaagagggaagcgtatcaatggccctataaactgcgtctgccctcattaatggagggaaatttgtgaatacgccttattcacagtcagctttacggcacaaccaagtgttcatttggctttgtgttttgtcatttttcagcgtattaaatgaaatggttttgaacgtctcgttacctgatatcgccaacgattttcataaactgccagcgagtgcaaactgggtgaacacggcttttatgttaacattttccatcggaactgctctgtatgggaagttatcagatcagctgggcatcaaaaaactgctcctatttggaattatggtaaatggcttcggatcgatcattggatttgtcggacactctttctttcctgtactcattctggcccgatttattcaaggggctggtgcagccgcattcccggctcttgtgatggttgcagtagtacgctatattccgaaagaaaacaggggtaaagcatttggtctgatcgggtcgctggtggcaatgggggaaggtgtcggaccagctatcggcggaatgatcgctcattatattcactggtcatatttgctgcttattccgacagcaacagttatcaccgttccattcctgatgaaactgctggaaaaggaagaaagaatcagcgggcgctttgatatgacggggattatattaatgtctgcaggcaccgtattttttctgctgtttacaacgtcatatagaatgtcttttctgatcatcagtattctggctttcctgatatttgtgaaacatattaggaaaactcaagatccctttgttgaccctgcactggggaaaaatgttttgtttatgacgggcgtccttagcggaggcctgatattcggcactgctgcaggatttgtgtctatggttccttatatgatgaaagatgttcaccatttaagtactgcggcaattggaagcgggattatgttccccgggacgatgagcgtcatcatcttcggttacattggaggattgcttgttgatcggaaaggttctttgtgtgtgctgaccattgggattgtattgatgtcttccagctttttaatcgctgcctttttcatagatgcggcaccttggcttatgaccgtcataatcgtttttgtgtttggggggctctccttcacaaaaacggttatatctacaattgtgtctggcagtttgaaacaaaaggaagccggcgccggaatgagtctgcttaattttacgagctttttatcagagggaacgggtatttcgattgcaggcggtttattatcgatcagcttgctgaatcaaaggctgctgcctgttaacgatgatcattccgcttatttgtacagtaatatgctcattctttttacaggaatcgttgttatgagctggctggtaaccatgaatgtctataaacgttcgcgaagaaatgactaaaaagggaaaaggatcaaacttgataaaagttttgatcctttttttaaggagcttccttattacggaaccttttgccgatcaatgaaaggggcgttaaagtgaattacatttataagaaaaaggaaaagaaaaatggaaaattgtatcatttcaatcagagataaatgggagaatgcacttattgagtctgaacaaaaaaataatcgtaatcaattaccgtaacgagaaaacaaccaagttttcactgccaatcgagacttttgaaaaagtgtatgaggatattaaaataggccggagagaaagttaatcactgtttgaaaatgactatgaagttcgtaagcggtatggttttaaccgcatctggattcccctggcaaagtaaaggtctttagggatttatgtcaaaataatagtaagtaccttatgcaacagggagtttggttgcttcataaggaggggaagtatgaaaaataagattcacatattgggagcctctggtgtcggaacgtcaacattgggtgttgcattatcaaagcatttgccgcatacgcatcttgatactgatgattactattggacagataaattcactaaaaaaagagaaatcgctgaaagaagaaagttacttaaaaaagacttgacaataaatgagaaatggattctttctggcgcagtgtgccgctggggcgatgatctaaaaagttattttgaccttgtcatcttcttatggattccgcaggatatacggcttgagagattaaggcatagggaatttcagcgttatggaaacgaagtgttagccggcggcagtaaatatgaacaatcaaaaacatttttagagtgggcttctttatatgatcattccggaatggaagttagaagcaaagctttacacgaacattggatgtcggatttatcttgtccattgttaaaaattgaaggagattactcagtcaatgaaagagttgatcgtgtcttggattatctgaattctaattaaactaacggatggagataactgcaaaatccaaaagtcaaagacagttccggccattttaacggagctgttttttataccgccttcagtttgtctgttgtgaagtgatttattctcggaaagaagcagcggaattaatagagaactcacttcgggaaaccgtgaaggcaggaatcaaaacgggagacttggcggtcaatcatcaacgtcagactttgcagaagaattgcagaaatgatcggatgttaaggcggaaaataagaagtgagaagcagatcatcaaaacgcaatacacctcaatttatattttcagtaagatcggctctgctcattaaaaaactcaattcgaagattagcggcatcaatattgccgcagatggggttagtgacataaagaggaagggataagaccccttccttaaaacctttaattcctctaatttcattgtcagatatattccttttttgaaatgggtatccaaatttcacttttaaaagatggcgatgttacatccttatgctcgttccacaggatttctgggccttcaatttgttcataatgtgacgatggaaaccattcggaataaatccgcccccatacttcctgcagtgcatccggaaatgatccggctgcttcgaatacagcccatgttgaggcagggacttcaagctgtgataggtgatttgggcaatgtttcgttgtggctgcgccaatatagtgatcaagctctccgttttcctctgtcctgccttcagaaaagttcgtggatgcactgatgagtcctgcaggcgctgtattagaaagctcttttagttgtttgattgctgcttcatctaaactttcccacatcgatgcaatgtcaggattcacgcctttgaacaaaatagggactctttttttaatgccgacgatgcgaaatgcctctttttcttcaatgcgatagttcatttcatttcctcctttgattgataactggaaggtcattcgcggataagctttaagtgaatggccattatgtttaacttctgatgggtttatgccatgcagattttgaaatgctcgtgcaaaagaatctggtgagtgataaccgtattttattgcaagatcaatcacctttacgcggctgtctttaagttcaaaagctgcaagagtaagacgtctgcggcgaatatattccgataatgaaatacctgtaaggaaggaaaacatccttttaaaatgatattcagagcagaaagcaagccttgctgcttctttgaaatcaatagcgttcgtgaggttttcttcaatatacgttaatgcgctgttcatccttttaagcgaatccatttatttgacctcctttaacaaaagaataacaggagcgaaatgtatctgcccgacatttcgtgcacagttttgcaggataacttatatgtaataaattaagttactcacctgtatttgtacagataaagaaaacacctaataactgcttgggtttcataagatgaaagaaagttatcattgttttatattgaaaagaaaatagaaaaagacggagttttcttgcgggaggggtttactatcaatcaattgaaagctgcatacgcggaggcagttaaaaaattttagttgatgtcgagaacgatgttcatcttcactgcttgttcaattagaggaagtgattcttccttaagggagatcactttttttattcgactaaagcagcagtttagcggaagaaggagaaaaatcagttgacttacttgaatactgaataggtgtaaaaagtggttattcatacggattgaaaaagaagaacacgcagcagactcacttgctcttgtttggggcaagtgttgacaaccctattagctggtttaattaaagaaggggtataaaacctgtatcaatgatgttactagatatctgcgacacaggttttatatttagctaaaatattcttatatattccacattgcatttttttattatgcaatagttcactctatttctgctttcaatttttcgaaccactctaaattaaccaagtgatgtgaacgggaattttcattcatacggcgaaagtaattgattgtgccgggaatttcttgagtgatggacaggtattcatcaaggagctcgattcgagttttagtctgatcgatttgtgattggatcagttccagtaatttatttttgtcgaattcatcggcaaagagtaacgccccataaaattgcaggttcacatattccgatttggtgccgtatttgatcattaatttttcaaattctgcccttcccgaatctgtgactttaaagttacggatttcacgcccgctggttgagggtttctgctgaatctgttcaatcaaacacttttcttcaagttgctgcagattgtaataaaatgaacctttcgtgaagttaacaatgtatttgtaatgacgtttttccattaaggccagaagttcatagccgtgagctccggggttttggatgagcaagccaaggataagtaagggaatcatggtttcatcaccttctccatccgcgcctcaaattccgcgtacgtgattttacccgaagccaaatccatactatgaaggtaaatctgttctgttttagaatagtcacccttcactttcagtgattgctcctctcccgaaatgggtttcaggatatggtgctttttcgagaaagcctcgaaatagcggtaaccgaatttgcgttgtgaagctgcgtctaaatgaatgccatcaggattcgcagtcaaacctgcagcagtaacaaaataacaattctgttgttcattagcaaaacgcagcaattgttcattaacctgtcgaaattcagtcgcgtgctgtccaaaaccggtcttcccaagaaagtcaccaagccctccaataatcaacggtacatcatcaagtttcaactcgtttcttagcgtctcaatgataagagttaatttctcgtaataagtttcatgcagcgaacgataactgtcactctcaccttggtgccaaaggattccgcaaatttgactggaacggagggcgaagcgggcttcggacaaagcatgctgaaaaaggatgccttccggatgccagtcattcaatgaactgccgccttccgcacaagggatcaagccaatttcttcatcgggatgagctttcgaccaagcatctgcaaaagatgccgccaagccaacgccggaaaccggacggtcgtaattaatcggctctgtcatcatctgccactgtccattgcgcagcatttttattttttcattatagatagggtctacttcattcaaaaatccacggcccgccatattcgactgccccaacattaaaaaagactttatcatttaatttttcacttctttacatcaatattttagtctaattagactatagtcaattcagcttgtcttgtaaagttctaataaggttttacttttattagtagtatgtatgaaaagcaaactaacattgaaaatttggtggatgtatttgagaaatagcaagttcttttgctttagatcttgataaacaatgaaaaacaacaaaaatcctgtcatgtaagggttcctatgaggttcaaaatcattaaaaaggttaacgattgtaccaattctattcatttgttatgttttacttttaaatcctgaagttatacttgaagaggaatgtcctaaaatgcagaaaaagccgggatgtcagatccggcttttcgctcactttcctttcttcttccgcttctccttttccgcccggtaaaactcatgaaacatcttcatcaatgcgcgtttttcaatccgcgacacgtaactccttgaaatgccgagctcctttgcgatctcgcgctgcgttttttctttttttagatcaagcccgaagcggccgacgatgacttctttttcgcggtcgtctaaaatatcgatatattttttgaccttttcaagttccatgttgagctgaatggtgtcgatcacatcctcgctttccgacttgaggacatcgatcaggcttatttcattcccttctttatcctggccgatcggatcatgaagggagacgtcttttttcgtttttttcaatgcgcgcagatgcattaaaatctcattttcaatacatcgtgcggcatatgtggcaagcttcgtgccttttccggctgagtagctttcaattcctttgatcagcccgattgtaccgatggagatcagatcttctgcgtcctctcccgtattttcgaattttttcacaatatgggcgactaaacggagattgtgttcgatcagcatgttgcgggcatgttcatcgccttcagccataaggtctaagtattttttctcctcactatttgagagcggttgtggaaaggcattatttttcacgtatgatactaaaaacacgagttctttcacaataaacccgagcgctgcaaaaacacctgtcaccatcctcacctccacaaagttatgtaggcaaaagcctatatgtaactgtatgtggcagtcaggctgtttgtgtctgtacagggaaattaatcaaaggcaggttttatttcttacagcctcttgatttttgctgattgagcctgtatattgttaaaaaaagtaagggtgaaaagaatataacgaaaagcgctgaagagacgagtagacagatatcattcatgacagagagctccgggagctgtgaaggagtatgaatggatgtgttgaaacaaacctcttagcttcgcatcggaatcatgaaaaacgaggatgatgcggcggatactcctgttaccgagtaagttttgtacccggcaagaggccggcaccaaaccgaattgaggtggcatagcgggctgtttcccgtcctcaagactttattgtcttgagggcgttttttatttctaagggagggataagatgaaaaacctgaagtcttggcggtacccgatgcttctgttaaccggaatcgggatagcaaatattggtgaatggatttattttttgtctcttaatcttattgttttaaaagaaacggggtctgcttttgcggtttccatcctttatttaatcaggcctgcggctgttttgatgacaaatgggtgggcgggcagcatcatcgacaggtgtaacaaacggaatatgatgatgtcgcttgatttcatccgggctgcattcattgccgttctgccgctgatgtttactgtaaggtctttgttttccatttattgtatcgtgtttttgattcaaatggccaatgcgatgtttcgtccgtgttccatggcgtatgtgacgatgcttattccggctgaaaggagaaaacgattcaattcactaagggctttgtcggaatcaggggcttttctcctcgggccggctgcggccgggctgctttttatcgccggcacgccgatttttgcgatttgggtgaatgcggcggctttagtgctgtccggtttcatcacgatgatgctgccgagccttgaaaatgagcctcacgtacattctcccagacagaagctttctttggcagtgtgcaaagaagattggaagctcgtctatcgcttcagccgaacggcgcgaaacgtcatgatcatttattttttattcagtctggtcatgaccgttatgccatccgcgcttgattcgcttgaagccgctttttcaaaagaagttcttcagctgactgatgccgattacggttttcttgtcagtgtctcaggggcaggcattattgcgggggcgcttgtcaatgtaatctttaataaaaaaatgccggcttctttattgatgggaatgggctctttattcacagcggccggatatatgatttatgcgttttctgacgttttttggacggctgctttcggatttttccttctcgctttttttctggcgtttgccaatacaggctttctgacgttttatcaaaagaatgttccggtggacatcatggggagagtggggagcttttattcattagtcgaagccgtcttcattatattggtaacggcggttttcggagcggcggctgtcggttcttccgtccgcgtcatcgtcatcgcaggggctgctgttatgctggcgttggcagccgttttatgctcgttcttatttgcggcctcaaaaaggaggactcccgatgtgtttcaagcggatcaatttaaagaaacataaagagacggccgtttcatttcgtgaggatgagtatctcaggtggctgtcatcccaaatctaatgctcacccgacaattttaagctgcttcttcataacgggcagccgatcggacagcttgaagcttccatcaacttttaccgcagccaaaaaatcggttatgtgcacctttactgagcagcaaagagaacgcggaacgaagctgcatcaatttagaattaaacggaaaagttctcagaatgagaggagccgtaccgccggaataggaggcggtacgcgcttcattttttcgttgtttttaaaagaccgggaaacttcttataaatgaccgccattaagacgagcatatacattccgtaaatcccgaaagacagcagtttgttgcttgtaaatgaagcgcctgcgacggtcacgatcacaatgttcggaattttgccgagcaccgacgcagaaaaaaagatcggccatcgtatgttactcagcccgcagacggtattcatggcaagcgacggtataatcggaatcagccgcccgaaaagcaccgccgtaaacgcgtgctgatgaaatgaaccttcatattgagccgcggccgggtaagccaccagtttttttctggcccagtctctgaatccgtaccggacgagaaaaaacaatgccattgttccgagcattgcgcctgacaatgtaatccacactccgtttacaatcccgaaaaccgctccgtttaaggccgcgataatggcgaatggaacgatcggaaaaaatacgtcagctgcgaccagaaggatactcataagcacggcatacatgccgcccgcgcgaatcatgctgagccagacgtctttttgcataaagccgatcatcacgacagcaatgatgacggcaagactgaatcccttttttatcatctgtacgttcacctcttttcaattagtatacagcacaaatctatctccttctattaaaataagctgtccgataagcgtacttgtttatcagcatttgccgtttgatgagaaacggctggcagccgggtttggacaaaaacatgcgggaagcgggtgatgtgcatcatttgatgcagagaatgattttatacaaaaggggacacgttaacagtagtgtttactggaggtgtaaacgttgagatgctttcatctgatcatcatgatatgcgtcctcacgggtctcactgccgtgtccgccgatgcgaaatctttaaaaagaagtgacatggagaagacgggaaacgtgtactgggatataaggtctgaaaaaaagaagctatctttaaccttcgatgacggcccccatcctgtctatacggaggctgtgttagacgtgctgaaacagcacaatgttaaagcaacctttttttgtatcgggagccgtatagacaaataccccgtaacggcaaaacgcatcgttgaagaagggcatgaaatcggcaaccatacgatgaaccatgtttattttcaccgtttaaaacgcaaagacattttacaagagcttcacagctccgcgcatcatatcagatcgctgcagccggaaggggacaagttattccgcccgccgggagggtcgctgaatcatacggctttcaaaagcctcttaaaagagggctatcatatcatcatgtggtcatggaaccaagatccgagggactggaaaaggcccggaaaaggaaaaatcgtcaggcacgttgtttcacatgccagagatggagatatcgttcttctgcatgacggcggaggaaaccggcgccagacggttgaggctttgaaagaaatcattccccagctgaaaaagcagggctacacgtttgttaaggtttcggatttgatcggacaggattccggtccttttcatatccagtaaagagagcgccgcgttgaaagccgccaaagagatgtgtaccataggaggtaaggtttggggggagagaaaatgaagtttgctgttctttttattacgataacctgtctgttatcaggatgcgctgcgggcaaagagaaaagtgttgtcgcgttcggcgacagcaatacgcgcggttccaactgggattatcgtgattatccgaaggcgcagcagtgggtaaacattttaaaaacagcggaacgcggccgtcttacggttataaatgcgggaataggcggccagacgactgaggatgcgcgcctgcgctttcaaagcgacgtgctggagcgtaagccccaatatttatttatcatgttcggaacaaatgatgcgggcattttgacgggagatcagccgcgagtatcaaagaaacggtttaaagaaaacctgacttatttcataaacgaaagcagaaatcacggcataaagccgattttaatgacgtgcatcccggttatagaaggaaacggaacgcatcatctctattactattcgagatataaagcctcagcctttaaagaaaaaggcggcgcgagaacatggcataattcctataacggcgttacgaggcaggttgcagctgagttgaaagtgccgctggtggataactggaaacactttatacgcgcggacggcggcaaagatacagaccgggcgctgatccaatccggactgatagatccctccggaaatcatatgacgccaaaaggcgccagaatcttaattgaaggcataaaaaatgggcgggttttggaacgctgacgccgtcagctgcctaaaccgttttgcttctgcttcataggctgtagaaaaaacatcttttggaggcgattgctatgaaccgcggtttccctccgcaatatcctgtatgcccgcctcctcgggtgaatgcggggtactggtacgcattttttgttgtgctgctcgtcgtcattctcgttctgggcggtctgtattggttcaatatatagcagccgtcctcttaaacacctctattttaggggtgttttttgttgaaagtggtagtaatgcgcataaccgaagtgatataatatcagtcatctgagtaaaaaaaggaaattcgcccgggaattttttctgtttaagaagaaacggaaataatgtgtccgagcgatcttcttttgatttcgttttcaattaactcgataaattcacggctcaaattcatttcattggctttgaaataagattctattagtaattcatcagaaagctttctcatgccggggacccaattaatgggagtggcacctccttacaattgtaatcaatcatcagacgcaagcatatgatggaaggttgcgtttcaatcatggtgaggttatctttaatctaccatgaaatacaaataagaacaatcgttctgttatccacactcgtaagtggataacttgttagtatcttgtttataatctggataaatccggatgtaataagagtggataatgtgtgtaattttatccacaactggtgaagaaacccaatttttgtcgaaatttttttaccgagtccgactttgtttttaaatctgacagatttcgacatatagatgatagaaagaaaaggaagggtgcgggttttgttaaaaaagttttttttacctgacgaatttgtgaaaaatatatttcatatcacaccggaaaagctcaaggaacgcaatgtgaaagggattattacagaccttgacaacacgcttgtggagtgggacagaccgagtgcgacacctcgattaatcgagtggtttgaagaaatgaaggagcacggcattaaagtcacgatcgtctccaataataatgaacgaagagtgaaattattctcggagccgcttggcataccgtttatttataaggcaagaaaaccgatggggcgcgcctttaaaagagctgtcagcagcatggagctgaaaaaagaagactgtgtggtcatcggcgatcagctgcttactgatgttctcggcggaaacagaaacgggtatcatacgatcctcgtcgtgcctgtcgcttcctctgacggagtcatgacgcgctttaaccgccggattgaacggagaatattgagttctttgaaacgtaaaggccatattcagtgggaggattaggaatggaaaaggttgtttgcatcggctgcggagtaacgatccagaccgaggataaacaaggtctcggatacgcgccaaaggcatcgctcacgaaggagaatgtcatttgtcagcgctgcttcagactgaaaaattacaatgaaattcaagatgtttcattaacggatgatgactttttaaatatcttgcacacaatcggcgatactgactctctaattgtcaaagtcgttgatatttttgattttaacggaagctggataaatgggctgaaccgctttgtcggcggtaatccgatcattcttgtcggtaataaggccgatatcctgccgaaatccgtaaagcgggaacggctcgtccaatggatgaaacgcgaagcgaaagaatacggcttaaaaccccttgatgtctttttaatcagcgcttcccgcggacaagggatgaaggaagtcattgacgccattgaacattaccgcgaagggcgggatgtgtatgtggtggggtgtaccaatgtcggcaaatccacatttatcaaccggattattaaagaggtctcaggggaagagaatattattaccacctctcaatttccgggcacgacgcttgatgcgattgaaatcccgcttgatgacggatctgcgctttatgatacgccgggaatcattaaccatcaccagatggcgcattacgtggacaagcgtgacttaaaggtgctgacaccgaaaaaagaactgaagccgcgcacttttcagctgaatgaaaaacaaacgctttatttcggcgggcttgcccggtttgactatgtatcaggcgataaaacggcgtttgtctgctatatgccgaatgaattgatgattcacagaacaaagcttgaaaatgctgatgccttatacgaaaagcatgcgggagaactgcttaccccgcccggaaaagatcatttggatgaatttccggagcttacggcccacacgtttacgattaaagaaggaaagacggatatcgttttttccggactcggctgggtcacggtgcagcaagcagataaaaaaataacggcatacgctccgaaaggcgtacacgtatttgtccgccgttcattaatatagagagaaggggagagggagcatgaaacaattgtacggagtaatcggaaatccgatcgggcattcaatgtcacccgatattcataacgcggctttgcaagataagaacatcaacgggcagtattttgcgtttcaggtggaacctcattatctcaaggacgccgttaacggaatcaaggcgcttggcatctgcggagtgaacgtcacagtcccgcataaagtcgcgatcatggagcatctggatgaaatacatgaaagcgcgaaagtactcggggccgtaaataccgtcaaaagagagggagacaggctcatcgggtataatactgacggagatgggttttataaatccttagtcaaagtattggacaaaccgatatcagagctctccatcctcatgattggggcgggaggggcggcaagagcgatttttacgacgatcgtccgcagagagccgaaacaatttgacgtttgcaaccgcacgccggaaaaagcggaaagtctgattgcggctgctccctcttttcagcagaaacgcgcccttactttaaaagaagctgaaaatcagcttgaacaatatgacgtcattattcatacaacatctgtcggcatgtatccgaaaacggatgccgtgccgctctcattggaacgggccaaaacgggcgccatcgtttgtgatatcgtatacaacccgattcaaacggcgttcttaaaagaagctgaaaaaagaggtttaacaacccttgacggtgtcggcatgtttgtggaacaggctgcactgtctttcaagctgtggacggaacaagagcctgacagcggcttaatgagagcaattgttgaaggaaaactaggaggaacacaatgttaacaggaaaacaaaaacggtttttgcgttcaaaagcgcatcatttaacgcctatttttcaagtgggaaaaggcggagtcaacgaaaacatggtgaaacagattgcagaggctttagaagcaagagagctgattaaagtcagcgtgcttcaaaactgcgaagacgataaaaacgatgtcgcagaagcgcttgtgaaaggcagccgctcacaattggtgcagacgatcggaaatacgatcgtattgtataaggaatcaaaggaaaataaacaaatcgagcttccgtaaggtggttgacatgaagaaaatcggaatattcgggggcacatttgaccctccgcacaacggacatcttctgatggctaatgaagtccttcatcaggcggagctcgatgagatttggtttatgcccaataaaatcccgccgcataagcagaatgaagactttacagacagccggcaccgggtggagatgctgaagcttgccatcagctctaattccttctttaagcttgagcttgcggaaatggaccggaaaggcccttcttatacctatgataccgtccgtttactgaaggagcggcacccgaacgacaagcttttctttattatcggggcggatatgattgaatatctgccgaaatggtacaaactggacgaactgctcacgctcattcaatttatcggagtgcggcgcccagggtatcatatcgagaccccgtacccgctgctttttgccgacgttccggaatttgacgtttcgtcaacgatgcttagagaacgtctcaaagcaaaaaagccgacgcaatacttaatgccggataaagtgaggcagtatatagaggagaatgatttatatgaatcgtgaggaagcacttgcctgcgtcaaagaacagctgaccgagcatcgctacatccacacaatcggcgtgacagatacggcggttattctcgcaggccggttcggagcagatccgaaaaaagcggaaatggcggctatttttcatgattatgcgaaattccggccgaaagaagaaatgaagcagatcatcgtgcgggaaaaaatgcctgctgagctcttggattacaatgccgagctgtggcatgcccctgtgggagcgtatttggctgagaaagaagcggggatcactgatcccgaggtcttggatgcaatccgctatcacacgtcagggcgtcccggaatgacccttttagacaaagtcatctacgttgcggattacattgaacccggccgccattttcccggagtggaagaggtgcgccgtctggcggaaacagatctgaacgaagcgctcatacaagcgatgaaaaatacaatgatatttctgatgaaaaaaaaccagccggtctttccggagacgtttgcaacctataactggctggtgtctcaaaaacgacaggaggaatatggaaaatgaatcaagcttccgtattaaaaatcgcggcaaaagcatgcgacgataaacgtgcagaagatattttagcgctggacatggaaggaatctcacttgtagcggattactttttaatctgccacgggaattctgataaacaggttcaggccattgcgcgcgaaattaaagatcaggcagaagaaaacggcattgatgtcaaaaagatggaagggtttgatgaggcccgctgggttttagttgatctcggcgacgtcattgtccacgttttccataaagatgaaagaagctactataatcttgaaaagctatggggcgacgcgccgctcgcagagcttgaactcggcttgaactcatgatttaccaaggcttcgccggtgtatatgacgagttaatgtcccatgcgccgtatgatgaatgggcgggctggatcgaagcgtctcttccggaaaagggaagggtgcttgatcttgcctgcggaaccggagaaatatccatcaggcttgctgaaaaaggctgcgaagtcacggggattgatttgagtgaagatatgctgagctgtgcccagcagaaaaaaacaggaaagccgattctttttctccagcaggatatgagagagctttccggttttgaagaacagtttgatgccgtagtcatctgctgtgattccctaaattacttaaaaacgaaaaatgatgtcttaagcaccttcaaaagtgtttttcaagttttgaaggagggcggcctgcttctgtttgacgtccattccccgtataaaatgacggagctttttccggacagcacccatgcggatcaggatgagcagatcagctatatctggcaaagctttgccggcgatgaagagctttctgtcatccatgatatgtcctttttcgtatggaacggacaatcttatgaccgctatgacgagacgcatgagcaaaaaacattttacattgaagaatataaacaaatgcttgcagagaccggatttgaattgaagaaagtgacggctgattttacagaccggcctccttcaacagagtctgaacgtcttttctttacggcaggcaaaccaaaaaccatcgtttaaacggaacgatggtttttaaaatgcattttttgcgattggcgtgataaagctctttatggcatactcagttacacgtgaaattgcttcttcactaacgatatatcttcatcgtatttgtcatgtgtacgctgaaagacacgattgaacatatcctgaacaccgctttcgagagccttcagtccttctccggtgacgccgccttttacgcatactttttcctgcaaggcgggaagcgtgtaatgccccgtttcaagaagctttccgagaccgacaagcatttctgtcgacataatcacggcttcttctttggtgatgtccgtttcttccactgccgcgtcaataaagcgctgaacgagataactcataaaagcgggcccgcagctgacaatgtctgacgccgctcttgtaataccgctgctgatttccacaggttttgaaatatgagtgaacagcgtttgaatatccgcttttgcagactcgctgcagcttttgccgaacgtaacaagcgagacgccggccaaggcgcggttcgtaatgctcggaatgacgcgggccgtctgacacggaaccgtatgttcaatctgatccgtctgaacggggctggtaatggagattaaaatgtgatctttccgtaaatgcggtgtgagttttttcagcaaaggatatatatccagcggttttacacaaatgaatatgatttcattatcctgtacgagcttttcctgatcctcggtgacgtggatgccgctgaaacgttcttttagttttaatgctttttcgattgttctgtttgtgatggtgatatgtgagggatcggcagcgtttgattcgataaacgattcaatcaggatcgttcccatgtttccggtgccgataaagcctattttcaatgaattcccctcctttttcccttaatcctctaaaccttatgcggggaggcaatgcaatatgacgaaagcgatgatgacggagcggatgcggcggaacctgaaaattctgggcgcttgtcttgcggcaggtgcggtttttatctgtatttggctgtttcgttctgaaaaggaagagccggtcaaacagcagtccgtgctcggtcaaacagcctccgcatccgtcgcggacaaaaaagacaccgcagacgataagattatgattgatgtgaaaggagcggtccgaaatcccggcgtgtatgaaatgaaagcgggagacagagtgacgcaagccattgaaaaagccggcggcctgaagaaaaaggcggatgaattgaatgttaatttagcagagcagctgcaggacgggacgattgtttatattccgagtgaaggcgaagaggagaatcgcccgaaaacagcagttggtgaaaaggagaatgcagctgtcaatatcaatacggcatctctggacgaacttcaggcgatttccggggtggggcagaaaaaagcggaagctattatcgcctaccgagaagaaaacggacggtttcagactgctgaagatttgatgaatgtatcaggctttggagaaaagtcatttgagcggataaaaacttccattacggtaaagtgaattgacggttctgcttaaatctatgtaaacttagaaaagcaacaagactttttggagggaacacttgtggaacgaatctcatggaatcaatattttatggcgcaaagccatttgctggcgctgagaagcacatgtccgagactgtcagtcggggcaaccgtagtcagagataagcggatgattgctggcggatacaacggctcaatcgccggcggcgtccattgcgctgatgaaggatgccttttaatagataatcattgccagaggaccatacatgcagagatgaatgcgattctgcaatgttctaagttcggtgttccgacggagggcgcggaaatttatgtgacgcattatccttgtattcaatgctgcaaatcaattatccaggcaggcatcaaaacggtctattatgccgaagattacaaaacacagccttatgcaaaagagctgttcagccaagccggagtcaaggtggagcaggtcgaacttgatgaaatgatcatcgatctgaaaaaccgcgaaaaattgtcttttgtcgcaggtctgattcagcaattatctgatgcgggagttaaggcagatgaactgaaaaaaattcatgaacaggccaatgagctgtttaccagttacgtataaatgaaatataaataccttcttctgcctctggcggcggtttctgcaactgcggggattgccgccgctcatgtcttctgggttctgctcctttttcttctgtatcttctctttattatgataaaaacaaagcagcctgctccggttatcatctgcctcgtttctttttgtgtttatttctttctttatacggtttgtgacgctgtgaatgtaacgcggtatcaggccggcagttatactgaacaggccgtcatcactaatattccgaaggttgacggagcgaaaatgtcagccgttatccgtacacatgacaaggaaaaatgggcggcttcgtacaaaatccggtctcttgaagaaaagagacgcattgaacagcttgaaccggggatgcgctgcacatttacaggctctctggaacagcctgcacatgcgacgattcccgggggttttgattataaggaatatctttactctcagcagattcactggttatttaccgtgacttccattcagcagtgtgaaaaatccaaacagccgctgtttaaactgctgagcatcagaaaaaatttgatttcgatcattcggaatcacgtgcctgaatcttccgccggaattgttgaagcgctgaccttaggtgaaagattttctatagaagacgatatactgagtgcatatcaaaatttgggagtcgttcatttaatggcgatttccggaatgcatgtcggtcttataacggcgggattattttatgctctgatcagaatcgggctgacaagagaaaaggcggggatattgctgctgctgtttttaccggtgtatacgctgctgagcggtgccgccccatccgtattgcgcgcatccctcatgctgggattttatatcgccggaactcttgttaaacgcggcattcattcctctgctgcattgtctctgtcttatctgctgctcctgctgtttaatccttacctcctttggcaggcgggcttccagctttcctttgcggtaagcgcctctttaattctgtcatcctccattttaaagaaagcagggaaaagcagacttgccgggcttgcgatggcttcattcattgcagagctcagctcacttccgtttcttctctatcattttcagcaaatttcacttgccagttttccgatgaatatggtgatggtgccattttatacgttatttgtcattccggtttctgtcatcggtttccttcttcttttactttcaaggcagatgggagaatgtttgtttaatatgtttgaccttgtgatgaagcctgtgcatgatttcattacatatgcggcatccgttgatttatttactatgattgtgttaaagcctgactttctttcccttcttctgcttgcggtttccgtttttacgctttttgcggctttagaaaagggaggttttttaaaactcaggaaatcggctctttttttctgcgcggttttggcttatttaatatgccgtccgtatttcagcccatggggagaagcggatatgcttgatatcgggcagggagactcgctgtttataaacgcgccgcaccgcaaagggaccgtaatggttgatacagggggagtgattgcttatcccggagaatcatggaaagaaaaacgccacccgtattctatcggcgagaaggttttgattccgtttttaaacggaaaaggggtgaaaaagctggatgcgctgattttaacccatgcggatcaggatcacatcggggaagccggagtgttaatcaaaaatcatagagtcaaacggttaattgtccccgtgggattcgtaaaagaaccgaaggatcagaacatattaaatatggcgaaagaaaacaacattcccgttgccgaagcaaagcggggcgacaccattacagccggtgatcttcagtttcaggtgctgtctccggagtcgtctgacggaaagagtaaaaatgattcgtcactggtgctttggacggttttaggcggagtgagctggcttttgacgggagatttagaatcggacggcgaaacagaagtgctgaaaacgtatccgaaactgaaggctgatatattgaaggcgggtcatcacggcagcaaaagctcaacgagtgaagcctttttgaaacagcttcagccggaagcagcgctgatttcagcaggaaaagagaatcgataccatcatccgcacgaagaagtgctggatcgtttgaaggcgtactctgtcaatgtgcttcgcaccgatatcagcggaacgattcaatacagatttgaaaaaggcgccggaacgttttccgtcttccctccatatgatatagaagaaaccagggcgcaagaagtaaaaaagactgccgattgacagcagcccggaatgcggctaagagccgataagatggatggctgttgccatcacgaacaaaaaggcgaaaaatccgaaggacacgacaaaaccgacagctgagtcaacagcatcatttcgtttgctttgaacgtttttttcaaaatcattcaatttcatccctcctgacttccctaagtatactggaattgttttgaaaaatctagaagtgatggtaacgttttctgttcttgtgattatcgcctttttacaagcagacccgggagcttgtgaatcaggcgtttattataaatgaggaagctgtcctttttaaagcttcctctttactatttgccgaactcaatttaggatagaaggggatcaagaaagagaggaagtcatacgatcatggtatttgatgtttggaaagccctgaaaaaaggggatgtccgctccgtttattgcttatacggaaaagaaacgtatctgctccaagagactgtcagccggatcagacaagctgtcgttgatgaggagactaaagattttaacctgtctgtttttgatcttgaagaggatccgcttgaccaggccataaccgatgcggaaacgtttccgtttatgggagagaagcggctggttatcgtaaaaaatccgtcttttttaacaggggaaaaaaagaaagaaaaaatagagcataatacaagcgctttggagacttacctgaaggagcctgcgccttatacggtctttgtgattgtggctccgtatgaaaagctggacgaacggaaaaagctgacgaaagcgctgaagcaaaaagcccttatgattgaagctaaggagctgaatgcaaaggagacgactgattttacgattaatctggcgaaatccgaaaataaaacgatggatacagaagctgccgagcatttggttctgcttgcaaacggccatctgtcttccatatatcaggaaatacaaaaactctccgcctacaccggtgacagacatgagatcacgcttgaagatgtccgggagcttgtcgcaagaagtttggagcagaatatttttgagctgatcaacaaaatcgtgaaccgaaaacggacggaaagtcttcaaatattttatgatcttttaaaacaaaacgaagaaccgatcaaaattatggcgctgatcgccaaccaattccgtctgattatgcagacaaagtattttgcgggacaaggatacggccaaaagcaaatcgcttccaacttaaaggtgcaccccttccgggtaaagctggcgatggatcaggcgaggctattttctgaagaagagctgcggcgtattatagaaaggctcgcagtaatggattatgaaatgaaaacggggaaaaaggacaagcagctcttgctggagctctttctccttgagcttctccggactgaatgaaaaaaacgatccccgttaaagggatcgtttttgtattatgcagaaagtccgttcacttgtttcgcaagtctagatttgtatcgagctgcggcatttttgtgtacaagacctgttttcactgctttatcaatgcgtttcgctgcttcagaaagagcagttttcgctttatccgcttcgttgttagcaacagaagcttcaacttgtttgattgcagtacgcatagcagatttgattgtcgcgttatgagcgcggcgttcgttgtttgtttttgtacgtttaatcgctgatttaatgtttggcatgtgtttcacctcctaagatacaacctgtagcacagtgtcttaaggttaaatcttcttcacaatagaacaaattgtattctatcaaacagaactttagattgcaatataaatgtaaagtatttttcgttgatgggtaaattcgcatgattcgttttgtaaatggccacactatgtaccacgatgattgaaggaggtctttcctgtgaaaaacaacgaactggatgtcaatcaatttctgatacggacggatttagcggtagaaacgaaacaggcggtaaaagacggacaagccggtcagacaaaagaaataaacgggtttattgaaaaagaacgcgacaagggcggcattaaagtcagaaccgtcgatattaccaaagaaggcgccgagctatcggggaaaaagcagggacgctatgtcacgatcgaggctcaaggggttcgggaacacgactctgacatgcaggaaaaagtaacggaagtgtttgccgaggaattttccgcctatctgtcggcattaaagattccaaaggatgcaagctgtttgatcgtcggtctcggcaactggaatgtgacgccggatgcgctcggccctctcgtgaccgaaaaccttcttgtgacaaggcatctgttcaggcttcagccggaaaacgtgcaggaagggtacaggccggtcagcgcgcttgctcccggtgtgatgggattaacgggaattgaaacgagcgatattattcaaggtgtgatcaaagaatcaaagccggattttgtgattgcggtagatgctcttgcggcaagagccgttgaaagggtgaacacgaccatccaattttctgatacgggcattcacccgggatcaggcgtcggcaataaaagaaaagaattaagcaaggaaacgctcggcatccccgtcatcgcaatcggggtaccgactgtcgttgatgcggttacgatcgcgagcgatacggtggattatatattaaagcatttcggcagagagatgaaagatgacagcccgtcaagatctctggtgcccgccggaatgaacttcggcaaaaagaaggtgctgacagacgaagaccttcccggagaaaaagaacgccaatcctttctcggtattgtcggcacactggacgaaaacgaaaaacgccagctgattcacgaagtgctctctccgctcggccataatctgatggtcacaccgaaggagattgacacctttattgatgatatggcgaacgtgcttgcaaacgggttaaacaccgcccttcatgaaaaagtgtcacaagataacaaaggttcttataatcattaaaatggttctacctcctctagcttgttcatagagtaattactagacaagcgctggagggattcaaatcatgagaaaaaaacgcagaaaccgtcaaattgtcgttgcagtaaacggtggaaatgcgctcaagggcatgtttttgtttatgacaagccttatcgttattttcgtattatcgggtgtgctcacatcgcttcgccctgaactgaggctttcttcgaattctcttcacggaattgccggagaacttccgggtgacgcgtttgcacacctcctcggtatggaaaatcattatttcgcctcagagcttcctgaaaaagactcttttcagctgtcccggctttccttaaaactggcgacaagcattaatatggaagacccgcggagtttcttgggacgtgagctgccgggatttgcccaatacgatacggagatccttctggcggggcaggggactgattatacgaatatgcctgctgaatccccgccgccgtcaaaggtgatggaaaaagaaaaagaagtgaacctggcagaaatcgaaaacaaaacgaaaaaagaagaaaaggcgccgccgaaacattcaacaggcagcaaaaaagtcgtttttatttaccacactcataataccgaatcctatcttcctctgttaaaaggggaaacaaatccggataacgcccgccattcgaaggccaatgtcacgcttgtcggagatatgttcggaaaagcgcttgaagcgcaaggtgtaggagcgaccgtagataaaaccgacattcaggcccgcctgaacaaagacggtttaaattatgcgcgaagctacgacgaatcaaggccggtcgtaaaaagcgcgctcgccaaaaataaaaacctgcaatataccatagacattcaccgggattcccgccgcaagaaaaatacgacagccgacatcaaaggaaaaagctatgccagggtcgccatcgtcgtcggcaaaaaaagcgctaattttgaagaaaactataaactcgcaagtgaacttcataagctgatggagaaaaaatacccaggcttaagcgtcggtgttttatcaaaaggctctccgggagataatggagtgtacaaccaggatttaaacgatcggtcgcttctgctggaattcgggggcgtggataacaatcttgaagaactgaggcgcgcatcagatgccgtggccgatgtattcagcgaactgtactgggatgcagacaaggtcagctcgcaatcaggagagaagaaaaaacaatagaaatcaggtgatgcaaatgatccgttttaccggcaaatgcctgctgatcgccattgtcatgtttgtcggcgtattgttcggcatgcagcaggcaaacagcggaatgcttgatatgaaaggatacaaagatccctccttaaaaggagcattcacgctcggcggcggagaaggacaggaaaaagaagcttccattttggggcaaaccgttacggcgaaagatctggaagaaaaacaaaaacagctggaacaggcagaaaccttcaacctgttttcaaaagccggagaaaccctttcaaataccgtgacggactcggcacaggcgatgtatgagtgggtttcgaaactgaaccgttagcattgatgaagagaaaagcggatgattccttaaaggaagcttttctctttcttgttttaattgaatgtttacaatcctattgatataatctaagctagtgtattttgcgtttaatagtaggagtgatagattgtgacagataaagaaaagcgtttagagaggcagtcaagaatccggaatttctccatcatcgcccacatagaccacggcaaatcgaccttggcggatcggattttagaaaaaacatcggcgatcacccagcgggaaatgaaagaacaattgcttgattcaatggaccttgaacgcgaacggggaattaccatcaaattaaattccgttcagctgaaatacaaagcaaaagacggagaagaatatatattccatctcatcgacacgcccggacacgtcgactttacatatgaagtttcgcgaagcctggctgcctgtgaaggcgcgattctcgttgttgatgcggctcagggaatagaagcgcagacattggcgaacgtctatctggcgcttgataatgatcttgagattcttcctgtcattaataaaatcgatcttccgagcgcagagccagaacgtgtgcgtcaagaggttgaggacgttatcggccttgacgcttcagacgccgtcctcgcttcagcgaaagcgggcatcggcatcgaagacattttagaacagatcgtagaaaaagtgccggctcccgcgggagatccggaagctccgctgaaagcgctcatctttgactcgctttatgacgcgtaccgcggagtcgtcgcgtatatcagagtcgtagaaggaacggtcaaaccgggccagaaaattaaaatgatggcaaccggaaaagagtttgaagtcatcgaagtcggcgtcttcacgccgaaagcgcagccggctgacgaattgacagtcggtgacgtaggctatttgacagccgcaatcaaaaacgtcggcgacacccgtgtcggtgatacgatcacgagcgcggttaagcctgcggcagaagcgcttccgggctaccgcaaactcaatccgatggtatactgcggactttatccgattgacacagccaaatataatgatttgcgcgaagctctggaaaaacttgaattgaacgattcatctcttcaatacgaggcagagacgtcacaagccctcggcttcggtttccgctgcggctttttaggaatgcttcacatggaaatcattcaagagcggattgaacgggaatttaaaattgaccttattacgaccgcgccgagcgttatttatgacgtttatatgacggacggcgaaaagatcatcgtggataacccgtcaaacatgcctgacccgcagaaaatagagcgggtggaagaaccttatgtcaaagcgacgatgatggtaccgaacgattacgtcggagcggttatggagctttgtcaggggaaacggggcaactttatcgatatgcagtacttagacgccaaccgagtcagcattgtatatgagatgcctcttgcggaaatcgtatatgaattttttgatcagctgaaatccagcacgaaagggtacgcctctttcgattacgagctgatcggctacaaaccgtccaaactcgtcaaaatggacattatgctgaatgcagaaaaaattgatgcgctgtcgtttatcgtgcaccgcgattacgcatacgagcgcgggaaagtcatcgtcgaaaaattgaaagaattgatcccccgccagcaattcgaagtgcccgtgcaggcagcgatcggacagaaaatcgtggcccgctcaaccattaaggccatgcggaaaaacgtccttgcaaaatgttacggaggagacatctcgcggaaacggaagcttcttgaaaaacaaaaagaaggaaaacgccggatgaagcaggtcggctcggtagaagtgccgcaggaagcgtttatggccgttcttaaaatggatgacagcccgaaaaaataacggaagccgccgcagtcccgcgctgcggcttctttctgtaaagaagaaggtgtttcaaaatgaaatcagcttatattcatattccgttttgtgagcatatctgccactattgcgatttcaataaatattttattcagagccagcctgtcgataagtacttaaactcactcgaaaaggaaatgataaatacaatagaacggacgggacgccctgatctccgcacgattttcatcgggggaggcacgccgacatcgctctcacccgcccagctggaaaaattgatggattccattcaccgcgtgctggagccttctgacggactcgtagaatttgccgcggaagcgaatccggatgatttgtccccggaaaaattaaaaatcatgaaaaatgccggtgtcaatcggctgagcttcggtgttcaaacctttgaaggtgagcttttacaaaaaatcggcagagtgcataaacaaaaggacgtattcacttcctttgaacgtgcgagggctctcggctttgacaacatcagtctcgatttgatgttcggcctgccgggtcagacgctggccgatcttgacaattccgtcaaaacggctttgtctcttgatgcggagcactattccgtttactcgctgatcgtagagccgaaaacggtgttttataatttaatgcaaaaaggccgcctgcatctcccggcgcaagaacaagaggccgagatgtatgaaacggtcatgaggcagatgagtgaagcgggcatccgtcaatatgaaatcagcaactttgcaaagcccggatacgagtcgcagcataatctgacgtattggagcaatgaagcgtatttcggttttggcgcaggcgctcacgggtatatcagcggcacgcgcaccgtcaacgccgggcctgtgaaacattacattcagctcatcgaagaaaagggactgccttaccgtgacacgcacgaggtgacacgggaggagcagattgaagaagaaatgttcctcggtctcagaaaaatgtccggcgtacaaaagcaagcttttctcgataaattcggacgctcggtcgacgaactgtttcccgatgttctcaaagatttaaccgaaaaaggcctgatctgtgacacggaagaatcggttgcattaacgcatgagggcaaattattaggaaatgaggtttttggcgcttttttgggtgagttataattgacatttttcttttggtttgttacttttgatatagaattagcactcgctgaccttgagtgctaacaggggtgatgatgatgttaacaaatcgtcagctgttgatcctgcaagtgattattaatgattttatacaatcagcgcagcctgtaggatcaagaactctttcaaaaaaagacgagattacattcagctctgcaacgatcagaaacgagatggctgacttggaggaattgggctttattgaaaaaacccattcatcctcaggacggattccgtcggaaaaagggtacaggtattatgtcgatcatttgctgtcacccgtcaagctgacaaaaaccgatctggatttaattcactcgatatttaaagaaaaaatcttcgagctggaaaaaacagtccaaaaatcagcgcaaatcctgtccgacctgacaaactacacatcgattgtcctcgggccgacgctgagcgagaactatcttaaacagattcaaatcgttccgatccagccggataaggcggtcgccatcctcgtcacgaacacggggcatgtcgaaaaccgcaccatcaatttcccggctaaagtggatttggccgatattgaaaaactggtcaatatattaaacgatcgattagcgggcgtgccgatggacgaactgaatgagcgcatttttaaagaggttgtcacatatttaaggcagcatatcgccaactatgacagcatacttgaatcgctccgctccacattccatccggcggcccacgttgagaaattgtttttcggcggaaagatcaacatgctgaatcagccggagttccacgatattgaaagggtccgctcgctcttatctttaattgaaaaagagcaggatgttctgaagctgtttcagtcatcaaaagccgggatttcaatcaaaatcgggaaagaaaacgactacgaagaaatggaaaactgcagcttaatcacggccacctatacagttgatacgaagcagatcggatcaatcgcgattatcgggccgacgcgcatgaattattcaagagtcgtcagcctgctgcagcacgtgacttcggacttgtcaaaagcattcacaagtttgtatgatgaataagggaattttggcaatcattttcagtcatctttttacagcatttgagggaggtgaacacaatgtcagaagaaaaacaaaccgcagaacaggttgaagcagcagaacaagaagaagtgacagaacaggcagaacaagcggcttcacaagagcagcatgaagaaacggcaggtcaggaagaagcccttcagcaccaaattgatgaattgcagggtttgcttgatgaaaaagaaaacaagcttttgcgtgttcaagcagactttgaaaactataaacgacgcagccgccttgaaatggaagctgctcagaaataccgttctcaaaacgtcgtaacggaaatccttccggctctcgacaactttgaacgggcgttacaggtagaagctgaaagcgagcagacaaaaagcttgctgcaaggtatggaaatggtccgccgccagctgatggacgcacttgaaaaagaaggtgttgaagccatcgaagctgtcggtcaggaatttgatccgaaccttcaccaagccgtcatgcaggtggaggatgaaaacttcggcagcaatattgttatcgaagaactgcaaaaaggctacaaactgaaggatcgcgtcatccgtccttcaatggtaaaagtgaatcaataactacatagcaggaggtaattcaaagtgagtaaagtaatcggaattgacttgggtacgacaaactcatgtgtggcagtgcttgaaggcggagagcctacagttatcgccaacgctgaaggaaaccgtacgactccgtcagtcgttgcatttaaaaacggcgagcgccaagtaggggaagtggcgaaacgccaatcaatcacaaatcctaacacaatcatgtctgtcaaacgccatatgggtactgactataaagtggaaatcgaaggaaaagactacacgcctcaagaagtgtcagctattatccttcagcatctgaaagcatacgctgaaagctacctcggcgaaacagtttcaaaagccgttatcacggttcctgcatacttcaacgatgcagagcgccaagcgacaaaagatgccggtaaaatcgccggtcttgaagtagagcgtattatcaacgaaccgactgcagcagcgcttgcatacggacttgataaaacggacgaagaccaaacgattcttgtttacgaccttggcggcggtacgtttgacgtatctgttcttgaacttggcgacggcgtgtttgaagtccgttcaactgccggtgacaaccgtcttggcggggacgactttgaccaagtcatcatcgatcatctcgtagcagaattcaaaaaagaaaacggcattgatctttcaaaagacaaaatggcgcttcagcgtttgaaagatgcggctgagaaagcgaaaaaagatctttccggcgtatcatctacacaaatttctttaccgtttatcacagcgggagaagcaggtcctcttcaccttgagctgacactgacccgcgctaaattcgaagagctttccgctcaccttgttgagcgcacaatggctcctgtccgtcaggctcttcaagatgcggatctttctgcgagcgaaatcgacaaagttatccttgtcggcggatcaacacgtattcctgccgtacaggaagcaatcaaaaaagaaacgggtaaagaagcgcataaaggcgtaaaccctgatgaagttgtagcgctgggtgcagcgattcaaggcggcgtcatcacgggagacgtaaaagacgttgttcttcttgacgttacaccgctttctctcggtattgaaacaatgggcggcgtgttcacgaaactgatcgaccgcaacacgacaattccgacgagcaagtctcaagtattctcaactgcagctgacaaccaaacggctgttgacattcacgtgcttcaaggtgagcgcccgatgtctgcggacaacaaaacgctcggccgcttccagcttactgatatcccgcctgcaccgcgcggcgtaccgcaaatcgaagtttctttcgatattgacaaaaacggtatcgtaaacgtaagagcgaaagacttaggcacaggaaaagaacaaaacattacaatcaaatcttcttcaggtctttctgatgatgagatcgaacgcatggtaaaagaagcggaagaaaacgctgacgctgatgcgaagagaaaagaagaaatcgaagtccgcaacgaagctgaccagcttgtgttccaaacggaaaagacattaaaagatctggaaggcaaagtggacgaagagcaagtgaaaaaagcaaacgacgcgaaagacgcgctgaaagccgctatcgagaaaaacgaaattgaagacatcaaagcgaaaaaagatgagcttcaaacaatcgttcaagagctttctatgaagctttatgaagaagcggcaaaagcgcagcaggctgaaggcgcagcaaacgctgaaggcaaaaaagcggacgacaacgttgtcgatgcggaatacgaagaagtaaaagacgacgaaacgaaaaaataagttctttcccgcatggctttaggcggaagaacacacagcatattctgattcaacagacagaaagtcaaagtcaggcatctcttggctttgactttttttcttgcccgggataaaaggaattgaaaaaacataattcaaaatgatacaatctaatttatgtgagaaattcgggagagtgaagcgagatgagtaagcgtgattactatgaagtgcttggggtaagtaagagcgcttcaaaggatgaaatcaaaaaagcctatcggaagctttcaaaaaaatatcatcctgatatcaataaagaatccggagcagatgaaaaattcaaagaggtaaaagaagcgtacgaagcgctctcagacgaccaaaaacgcgctcaatatgaccaattcggccatacagaccctaaccagggattcggcggcggtttcggaggcggcggagacttcggcggcttcggtttcgatgacatattctcaagcatcttcggaggcggcacgagacgccgtgacccgaatgcgccgcggcaaggcgcggatctgcagtatacaatgaccctgtcatttgaagacgcggctttcggaaaagaaacgatcattgaaattccgcgcgaagagaattgcgaaacatgtaaaggatcgggcgcaaagccgggaacaaagccggatacgtgctcgcactgcggaggttcaggccagctgaacgtcgaacagaacacgccgtttggcaaagtggttaaccgaagagtctgccaccactgtgaaggaacaggaaaaatcatcaaaaacaagtgttctgactgcggcggcacgggcaaagtgaaaaaacggaaaaaaatcaatgtcacgattcctgccggtgtggatgacggacagcagctgcgcgttccgggtcaaggtgaacctggcgtaaacggagggcctgcgggagatctgtttgtcgtattccatgtgcgcgcccacgagttctttgaacgcgacggagacgatatttattgcgaaatgccgttaacgtttgcccaagcggcactcggagacgaagtggaagtgccgacgcttcacggaaaagtgaaattgaaaatacctgccggcacacaaaccggcacgaaattcagattaagaggcaaaggcgttcagaacgtccggggctacggacaaggcgaccagcacattgtcgtccgcgtcgtcacaccgacgaatctgacagacaaacaaaaagacatcatccgcgagttcgctgaagtcagcggaaacctgccggatgaacaagaaatgagtttctttgacaaagtaaaacgcgcatttaaaggcgagtaatgattggataggagttggtagttttgaaatggtccgaaatcagcattcacacaacacatgaagcggtcgaacccatctcaaatattttgcatgaagctggtgcgagcggggttgtcatcgaagatccgcttgatttaatgaaagagcgtgagaatgtttacggggaaatctaccagctcgaccccaatgattaccccgatgagggtgtcattgtcaaagcgtatctgccgattaacagtttcctcggcgaaacggtggacggcattaaagagacgataaataatctgcttttgtacgacattgatttaggcagaaacacaatcaccatttctgaagttaatgaagaagaatgggcgacagcttggaaaaagtattatcatccggtgaaaatttctgaaaaattcacgatcgtacccacatgggaaacgtacacacccgtgaataccgatgaactgattatcgaaatggatccgggcatggcattcggaacgggaacgcatccgacaaccgttctgtgcattcaggcgcttgagcgtatcgttcaaaaaggcgaccgtgtcattgatgtcggcaccggttcaggaattttaagcatcgcggccgccatgcttgaggccgaatcggttcatgcgtatgaccttgatccggtcgctgttgaaagcgcgcgtctgaatctaaaattgaacaaagtgagtgatacggccgaagtgaagcagaacaatttgttagacggcatcacgggcgaacatgatgtcattgtcgcaaatattctggcggaagtgattctccgctttacatcacaggcgtatgacctgctcaaagacggaggccattttattacttcaggcattatcggccagaaaaaacaggaagtaaaagaagcgttggaaaaagccggctttaccatcacagaaattctgtctatggaagattgggtcagcatcatcgcgaaaaaataacagttagtaggtgtcacagcgtatgcaacgatattttatcgagctcacgaagcaggagatggacgaaactcccgattttcaaattacgggggaagacgtccaccatatagcgaacgtcatgagaatgagtgcgggagaccggataatctgctgttcgaaagacggccatgaagcgttatgcctgctcaaagcggtttctaaagatcatatatcatgcagcattgctgaatggacgggtgaaaaccgtgaactgccgttaaaaatcaggattgccagcggccttccgaaaggcgataagcttgaatggattatccaaaaagggaccgagctgggggctagtatgttcatcccctttcagggcgccagatccgtcgttaagctagacgacaaaaaggcaaagaaaaagcgggagagatgggcgaaaatcgcgaaggaagcggcggagcaatcgtaccgcaatgaaattcccgaagtgaaaaccgttcatacgttccggcagctgcttgaaatggcggagaatgtcgataaatgtgtcgttgcatacgaggagtcatcaaagcagggagaaacgggcgctttcgccgcggagcttaaaagccttccgcaaggttcgtctcttttaatcgtattcggccctgaaggcggtctgactgagtctgaagttcatcagctttcagaaaaaggcgccgtcttatgcggcctcggaccgagaattttacggactgaaactgcgcctctttacgcgttaagcgcagtttcctatcatacagagttattaagaggtgatcagtaatggcaactgttgcttttcatacccttggctgcaaggtcaatcattatgaaacagaagcaatctggcagctgtttaaagatgcgggttatgaacgaaaagaattcgaacagacagcagatgtatatgtcattaatacatgtacggtaacaaacacgggagataaaaaaagccgtcaagtcatcagacgggcgatccgccaaaatcctgacggcgtcatctgcgtaacagggtgctatgcgcaaacctctccggcagaaattatggccatcccgggtgttgacatcgtcgtcggcacgcaggatcgtgaaaaaatgctcggttacattgagcagtacagggaagagcgtcagccgatcaacggcgtcggcaatattatgaaagcacgcgtgtttgaagagctggatgttcccgcttttactgaccgcacaagagcgtcgttaaaaatccaagagggctgcaacaacttctgtacgttctgcattatcccttgggcgcgcggcctgcttcgttcccgcgatccggaagaagtcattaaacaggcgcagcagctggtggatgccggctataaagaaatcgtcctgacggggattcatacgggcggctacggcgaagatatgaaagattataatttcgccaagcttctccgcgagcttgatacacgtgtagaaggactgaagcggatcagaatttcatctattgaagcaagtcaaatcactgatgaagtgattgaagtgctggatgcgtctgataaaatcgtccgccaccttcatatcccgattcagtcaggatcaaacaccgttctgaaacggatgagacgcaaatatacgatggaatttttcgcggaccgtttaaataagctgaaagaagcgctgccgggtcttgccgtcacatctgatgtcatcgtcggtttcccgggtgaaacggaagaagaatttatggaaacataccggttcattaaagaacataagttttcagagcttcacgtattcccttacagcaaacgcaccggaacacctgcggccagaatggaagaccaggttgacgaaaacgtgaaaaacgaacgggtgcataagctgattgcgctgtctgaccagcttgccaaagaatacgcctccgattatgaaggagaggttctggaaatcattccggaagaggcgtttaaagagtctgatgaggacggcatgttcgtcggctatacggacaattacatgaaagtcgtcttcaaaggcacggaagatgtaatcggcaaacttgtcaaagtcaaaattcaaaaagcgggctatccgtataacgaaggacaattcgtccgcgtcgttgaggatgaaatgacccgaaacatgcgcatgtcttcataacagataaaaaaaccggtgccttcccgcatcggtttttttacggtttcggaggaatcagcctgtcaatcagccggtaaaacaaatgtgtgaacggcagaaacaataaggcggtgactacgttaaataacaggctgaaatgcgcaatcatctgcgcgggatcatcagacaggcgctccgtaatacctgctgatgcagacaggaagggaaagacgagcagcacgccgagaatattaaacactacgtgagcaccggcggtctgtctggcggcataaccgcctgaaacagcagccatgacggccgtgacgcatgtcccgatattagatcccagaacgacgctgaccgcttgttcaatgccgatcaccccttcgttcataaaactcatcaaaatgccgatgcagacggagcttgaatgaatgattgccgtcaatatcatgccgataaaaagagcggaccagctcgaatcattcacatggcgcaaaacctccgccccgccttcatttctgtcagcggaacggcaagccggctgaagcatgtgatgcaaaaaaagatgatgccgagaccgaggaagcttataccgatctgcctgaacggatatttacggatgaggataaacacaaggcctccgataaaaagcacccaaatgagcacatccatctttatggctaaaaactccgtcgtaaacgtggagccgacattcgtgccgagaatcatcggaatggtccgtttaaaagataaagcgcctgcgctgacaaagccgatgacaatgaccatgaaggctgagctgctctgaagaaaaccggtgaatacgatgcttatgagaaaagctttcaaagggtggtcggtaaataagagcaggcttttctcaatttttgaatacgttaatgcgatcaggccctgcctgagcaggctcattccgagtaaaaaaaccaggataagtgcggtaaagagaatcagtattatcaaacgaaacacccctttccatcattatatagacaagcagccttattcatgacggaaaagtgagctcgcttagttgacctgactgatggcttatattataatgtcaaagtacatgtttatatatgtatctttttaaaggtagtcgattggtgtattcggagggagggaaagagaatgtcaaaaacggtcgttagaaaaaacgaatcgcttgaagatgctcttcgtcgcttcaaacgcagtgtatcaaagacaggtactttgcaagaagcaagaaagcgcgaattttatgaaaaacctagcgtaaagcgcaagaaaaagtcagaagctgctagaaaacgcaaattctaaaagagggtggatttatgagtcttcttgagcgacttaaccaagatatgaagctgtatatgaaaagccgtgagaaagacaaactgactgtcgttcgaatggtgaaagcttcacttcaaaacgaagcaattaagcttaagaaagacagtttgaccgaggatgaggaacttactgtcctatctcgtgaacttaagcaacgtaaagactccctccatgaattttcaaacgctgatcgtttagatttagtagataaagttcaaaaagagctggacattttagaaatttatttaccgaagcagctttctgaagaagagctgcagacaattgtaaatgaaaccatcgctgaagtcggtgcgagctccaaagcggacatgggcaaagtgatgagtgctattatgcctaaagtaaaaggtaaagctgacggcagtgtaattaacagacttgtcagcagtcaattatcttaattgacaagaaaaaagacatctttcctagagagatgtctttttttatacataaaaaaatgaaactaaagtacatttgttacgtatataaagaagaacgaaacgggaaggagggtatatttgccttgttccgaaaaaaaaacggaattgctgttgctctattgggcttatttgtattatctttattaggggttcaattgaacgcgaaagctgatcacccatcggtttatgtcatcccggttgagaaaaatgtcgaacaggggctcgcctcgtttttatcgcgttctttcaaagaagcgaaggagtccggcgcgtcacacattattcttgacatcaatacaccgggaggcgccgttcaatcagccttggatattgcggatatcatcggccgcgcggatgtgcctgttaccgcttacgttaataaacgggcgctttctgccggagcgtatatagcgcttcaggcagatgaaatctatatggcgccgggcggaaaaatgggtgccgcagccatcatcgacggaaaaggaaacgcggcggacaaaaaggctcaatcactgtggcatgcagaaatggaggacgcagcggttaaaaacaaccgaaatccgaaatacgccctggccatggcagatcccgccatcaatgcaaaggaagcgggcgccccaaagggaaaactgctgacactgacagctgaaaaagccaaggaagtcggatattcggagggcacggtttcagaccttgatgctttatatacaaagctcggttttgacaaagcggatgttcaccatgcaaaagaaggttttgtcggcaaattgggcagatggctgacaaatccgtttgttgtccccgtcttattaacgcttgctttgcttggtttgaccattgaattgttctcgccgggcctcggaataccgggtgccgtcggactgacggccatgctgctgtttttcaccgggcatatcgctgccggattcgccggctatgacagcgtattcttattttgcgcgggcttggtttttatccttttagagatatttctgcccggaggcataatcggtcttatcggtattgcaggcgtcatcgcgagcctctttctcgctgcgggcagctttaccgtaatggcggtttctctcttgatcgccattgctgtgtctattacagcctttatcatattaacaagggtgttggggaaacgaatgaaattctttaaaaaattaatattaactgattcaacaagcacggagagcggttatgtttcaaatcagaaccggacggagctgttggggaaagtcggcattaccgctacagccctcagaccgtcaggcaccgtcattattgatgatgaacgtctggatgtcgtctcggaaggatcattcactgaaaaagacagacaggtgaaagtagtgaaagcggaaggctcacgcattgtcgtgagagaaatatagatgataaccttgaggaggaattagatggaactgtcaagtttggcgattttagcaatagttgcagctgccataatcgtgttagccatattcttcacctttgtaccggtgatgctatggatttcggcgcttgcggcaggagtcagaatcagcattttcactttggtcggaatgaggctgcggcgcgtcataccaagccgcgttgtcaatccgttaattaaagcgcacaaagccggcctatccgcaacaacaaatcagctcgaaagccattatctggccggtggtaatgttgacagggtggtcaatgccctgattgcggcacagcgcgccaatattgagctgacatttgaacgctgcgcagccattgacctggccgggcgtgacgtattggaagccgtgcagatgagcgtcaatccgaaggtcattgaaacaccgtttatcgcgggtgtcgccatggacggaattgaagtaaaagcaaaagccagaatcaccgtaagagccaatatcgagcgccttgtcggaggagcgggagaagagacggttgtcgcccgtgtcggagaagggattgtctcgacaatcggttcctcgggtaatcataaaaaagtgcttgaaaaccctgatatgatttcgcagaccgtacttggcaaagggctggattcaggcaccgcctttgaaattctttcgattgacatcgccgacgttgatatcggcaaaaacatcggagcgattcttcaaacggatcaagcagaagcagacaaaaacattgcgcaggccaaagccgaagagcgccgcgccatggcggtcgcccaagagcaggaaatgcgcgctcgcgtagaagaaatgcgtgcaaaagtcgtggaagcagaagccgaagtgccgcttgcgatggcagaagcgctgcgtgaaggaaacatcggcgtcatggactatatgaacataaaaaatatcgacgcggatacggacatgagggattctatcggcaagctgacgaatgaccagcaagatgaagaccaacaataacctctctattaaggagggagccgctatatgcacgagattctgacaaatccgctcgtcattgccgccgtcatcggcattatatcggcaatattcggcaagaaaaacaaagatgaaaaacggccgccgggtacacgccccgaaaatcagacaaaaaagcaggatcaaaaacagccgcagaaagagcataagccggaagcggaagaattgcctgccgtttcagaagagaacccttttgagcaaaaaagaagggaagctgaaaagcgcctagcggagacggagcagatgtttaacgggcttgaacataagctgacatctcaacgcgcacgaaacgcgtctctgaagaaatcagccctcaaaataaataaagaaactgcggttcaaggcattatattcagtgaggttttgggtccgccccgtgcaaaaaaaccgcaccggaccatgcggagcatcggtaaaaaataaagtgttagaaccccttttcaaatcatacatatgagatgaaagggggttctttttttatggggcaaagaaagaatcgtgtaaaggcatggctgacaagagcattggaaattcccccggacgttatgatggatctgcctcggattacgatggtcggcagacttcatatctacatagagaatcacagaggcctcctgctgttcagcgaagaagaagtcaggctgatgctcaagcaggggcaatgtatcatatcaggaaaaaacttggtcattaaggcaatccttcctgaagaaattcttttggaaggcacgatagatcacgtacgatatgtcgattcataaagccggggggaaataatgtgaaaaacaaatggctgtcatttttttcgggtaaagtccaaatggaagtcaaaggaaaagggattgaacggttgctgaatgaatgcacgagaaacggaatcgccatctttgcggtgaaaaaaaagcaagactgtgttctgctgatgattcagcttcaagatgtacatgctttcagaagagtcatcagaaaacatgaatgcaaagcaagctttacaaaaagaaagggtcttccctttctgcttctcaaatcaaaattaaacctgggcttcactgcgggatttgtgatgtttttcgttatattgtttcttttgtccaacatgatttgggacattgatattaaaggggccaagcccgaaaccgagcatcagatggtaaagcaccttgaagaaatcggtgtgaaaaaaggacgtttgcaatttttaatgatgacgccggagaaaattcaaaaatcattaacaaacggcattgataatattacgtgggtcggtgtggaattgaacgggacagcccttcatatgaaagtggtcgaaaaaaacgaaccgacaaaagaaaagtacgtgagcccccgccatatcgttgccaaaaagaaggcggtcatcaaaaggatgttcgtgcaaaaggggcagccgatggcttttgtgaacgatcatgttgacaaaggacagcttctcgtctcaggactgatcggaaatgaagatcggaaagtcgcctcaaaagcggaaatttacggagaaacatggtacaagtcagaagtaaccgtgcctcttgaaacatcatttacgctatatacgggtaaagtaaggacgaagcacaagctgtctttcggatcatggggcgtgcctttttggggctttgaatttaatgaggagccgctgaaacatccgaaaacagaggaagaaaagcacccgtttcaatttctggggatgaagcttccgatttcttacgttcaagaacagacaagagaaagtgaaacaaccgtgcggacttatacgaaaggcgaagcggttcaggccggtatcaaaatgggaagacaagatgtagaaaagcgattaaacggcagcggagaggtggaaagtgaaaaagttttgcaccaatccgttgagaatggtaaagtaaagttgattattctctaccaagttatagaagatatcgttcaaaccacacctattgttcagggagactaaagaatggcagaacatttacttgcgattaatcacaaactgaaaagcccggacgaagcactttctttgttcggcagccaagatgcctttttacatttaatggagaaggatctgggcattagcctcatcacgcgcggtgaaaccatttacgtttccgggaatgatgaaacatttgagatcgctgacagattattgggctcgctccttactttaattcgcaaggggatcgagatttcggaacgtgatgtgctgtatgccgtgaaaatggcaaaaaaagatgaactggactattttgaaagcatgtatgaagaggaaataacgaaaacggcaaaaggcaaaccgatccgtgtcaaaaccctcggccaaagagaatatgtggcggcgatgaagaaaaacgacatggtgttcggcatcgggccggcgggaaccggcaaaacttatttggcggtcgtaaaagcggtgcatgctttaaaaaacggccacattaaaaaaatcattttaacaagacccgctgtggaagccggcgagagcctcggctttctgcccggagatttaaaggaaaaagtagatccttatctgcgcccgctgtatgacgcgctccatgatgtgctcggaagcgaccatacggagcgtcttatggaaagaggggttattgaaatcgccccgcttgcctatatgagagggcggacgcttgacgacgcgtatgtgattcttgatgaagcccagaataccactcccgctcaaatgaaaatgtttttgacgagattgggttttggctctaaaatgatcattacgggcgacgtaagccaaattgacctgccgaaaggcgtcacatcgggacttgcagtagcgaaggatatgctgaaggacataaacggcatctccgtgattgaacttgaccagacagatgtggtcaggcatccgcttgttgcaaaaattattgaagcttatgataagcaaaagtaatgcaaaaatgacccgatctcccgttatcgggtcatttttatatgatgtgttcctgatgtttcagggaggaggttcttgttttgaaaaagaaggaaaagggcaaaagcgcccgggaacggttccgcagtttcagacatgcccgctcagcccatgtgctgctgtacctgctgctttcagcgatcatgtttggtttgctctttattcatgtaaaacctgaatcacttaatttggatttgttttcagtcagtgataagacgatttacgcgcccgccacagtggaagatcagcaggcgacggaatcgaaaaaacaggcggccgaagatgcggtggaagatcaatacaccctgaaaaaaggctataccgacaaccggcttgacctgatcacttccatttttgacagcatcggcgaagtgaaaaaagatgcggaaaaagacaaaaagtcaccttcggaaaaatcattggtcaaatcggtgaaaaacaagctgacacaggatgtcaatgaatccgtctcggaagatgccattaaatcgcttctccatgcaaacaatgaagatttctcatttgtgagggattccgtcattaccgcggtgaatacggtgatgagcagtgaaattccttctgaaaagcttgccgaagcgaaggataaggtcgcaaaagagctgaaaagcgcttctgtgccgtcaaaatatttagcggctgcgactgaaatcggaaaatacgcggtcattccgaattacgtatttgatccgaaagcgacggatgaaaaacgccaggaagcgtcagacagcgtccagccggtacagatcaaacagggacaggttctcgtggaagagaatgacctgatcgaccgggaagtatacaggaagcttgaactgacggggcttttgaataattccaacctgttaaagccgatcagcggtctgcttctgatgatcgggctgtttatcgccacgcttgtctactattttgagaaacagcagcaggagcttaagctgaaaaataaatctcttttgctgttttctatcattacaacgcttattctcgtcattatggaagtcgtcagtctctttcagaagattgaatacaccaatatcggctatcttgtgccgatcgccgccggcgcgattttaatcaggctgctgctcaatgaaaggctcgccattttgggaagcatcattctggcgatctgcggcagtatgatgtttaatcagggtgtgacgggaacatttaattacgtcatcggcatttactatttaatcagcagcatttcaggcattctgtttttggggaaacacaatgcgagatcaaaaatattgcaggcgggactgttcgtctcatttattaatatgattatcgtgctgtcgcttttattaatacaaaatacggcgctgtcacctgttgaaatcggaacgctgatgctgatgggggtcgtctcgggacttgcttcatccgttttgattatcggtctgatgccgttttttgagacgggattcggcattctttcaacgatgaggctgattgaactgtctaatccgaatcatcccctgcttcgaaagattttaacggaaacacccggtacatatcatcacagcgtcatggtggcaaatctgtcggaagcggcttgtgaagccgtaggggcaaacggtcttttagcacgggtcggagcatattatcacgatctcggcaaaacgaaacgtccgcaatattttattgaaaatcagatgaatatggataatccgcatgacaagctgtctcctcagctcagtaaaaatatcattatcgcacatacgacagacggtgcgaatatgctcagaagctataagtttccgaaagagcttgtggatatcgcggagcagcatcacggaacgtcccttttaaaattcttttattataaagcgaaagaaaagggcgaccagattacagagaaagagttccgctacccggggccgaagccgcaatcgaaagaagcggctattatctcagtggccgacagcgttgaagccgccgtccgttccatgcataatcccaatcccgagcggatcgaaaaactggtgcggggaattatatccgataagcttcaggacggacaattctcagaatgtgatctcacgttccgagaactggatacgatcgccaaaacactatgtgcgactttaaaaggaattttccactcccggattgaatatccggaggctacgaagaaggtgaaataaatgggtttactcatagatattgttgatgaaacgaacagcgtctcagctgatgcgctccaagaagtggagaagctgctccaattcgcggcggaaaaagaaggcgttcaggatcaggctgaagtatcggtcacgattgtgacaaatgaagaaatcagagaaatcaacagagactaccggggaaaagacactccgactgacgtcatttcgtttgcgcttgaagaagaaggcgaagacgaggtggaaatcgtaggcgccgacatgccgcctgttttaggagatattatcatcagcgcagacagaacgaaagagcaggcggaagagtacggccattcgtttatgagagagctcggttttctggccgtgcacggctttttgcatttgcttggctatgatcacatgacaaaagaagaagaggaagaaatgttttcaaagcaaaaggatttgctggatgagtatggactcacgagatcataaaaacgagtggagcaggttcctgaagagctttgtccatgcatggaggggaatctggaaaacggcgcggtcagagcggaattttcaatttcatattaccgcggcctgcgccgttatcgtttgcggttttctcaccgggctgagcacagccgaatgggccgttgttttggtgctgatcggagggatgcttgctttggagcttttaaatacggcgatagagcatgttgtggatttagttactgatcagtatcacccgctcgcaaaagcggcaaaggacgcggccgccggagccgtttgcgtctttgccgtgatatcgtgtatcattggtttactcatcttcctgccgaagatatgttagcagaagattcttacaattattttacattgccaaaaatgggcgtgaaaaaccgatcataattatgtaaaataaaagtgacagcggtatcatacaggataaaggtaagagaggaattaagtacacatgaacagacaagaattgattgcagaagcattaaaagcacgggacacagcgtatgtgccgtattcaaatttcagagtgggagccgctcttcttaccaaagacggaaaagtgtacagaggctgcaacattgaaaatgcggcatacagcatgtgcaactgtgctgaacgcacggcgatattcaaagctgtttccgaggggatacggaatttgcgatgctcgccgtggctgcggatactccgggaccggtttcgccgtgcggagcctgcagacaagtaatttccgagctgtgctcaaaggatatgcttgttattctgaccaacttacaaggacaaataaaagaaatgactgcggaagaattattgccgggcgcattttcatcggaggatttacatgacgaacgaaagctttaaatcaggatttgtatctatcatcggaagaccgaacgtaggaaagtctacctttttaaacagggtcatcggtcaaaagatcgccatcatgagcgacaaaccccagacgacaagaaataaagtccaaggggtgctgacaaccggcacgtcgcagactatttttattgatacaccgggcattcacaaaccgaagcacaagcttggcgactttatgatgaaagtggcgcagaatacgctgaaagaagttgacttggtgttatttatgatcaacgccgaagaagggtacggaaagggcgacgagtttatcattgaaaagctcggacagacgtccacgccggtctttctgatcgtaaacaaaattgataagatccaccctgaccagctgcttcttttaattgatgagtaccgtgcgcgctatccgtttaaagaaatcgtgccgatctcagctttggaagggaacaacgtcgaaacccttctcgcgcaggttgaagcgtatttaccggaagggcctcaattctatccgagcgatcaggtgactgaccatcccgagcggttcattatttctgaactgatcagggaaaaggtgctccatctgacaagggaagaagtgccgcacagcatcgctgtcgctatcgagtccattaaagggcaggaaaacggctccgtccatgtcgccgccaccattgtagttgagcgggattctcaaaaaggcatcgtcatcgggaaaaaaggagcgcttctgaaagaagtcggcaaaagagcgcgggctgatattgaagcgctgctgggttcacgcgtttacctcgaattatgggtgaaagtgcagaaggactggcggaataaaatgtctcagctgcgtgatttcggcttcaaagaggatgaatattaattcatctaaagcgcatgcctgatgtgtgggattacctcacagaaacagggcttcgttagcaaaatttgtttaacatgaaaaggaggacatcaggtcaagataagggtaagaatttggattggcaagctagtttaatgatgaaaggtgggttttttgtgttgaattttacctggaacgtattttctcaaacaggaagtgttgatacgtaccttctttttaaagaactggaaaaagagaacctggaaagacccgaagaaccggaagatgagctagcccgaattgattttccaattttgtaaacctcttggcccctcccgttgttggaaggtgcggaaatgctgactaaatgtgaaggaatcgtgctccgtacgaatgactacggggagacgaataaaatcgtgacattgctgacgagggaacacggcaaaatcggcgtcatggcaaggggcgccaggaagtcagccagccggctgtcagcagtcagccagccgtttttgtacgggtcatttttaatgcaaagaacatccggactcggcacgctccagcagggtgaaatgattctcagcatgagaacgatcagagaagatttatttttgacggcgtatgccgcttttatcgctgaactcactgacaaaggaacggaagagaagaaaccgaacccctatttattcgaattgattctcgaatcctttaagaggctgaatgacgggactgacccggacgtgatcacattcatcgtgcagatgaaaatgctcggcgtcatggggctgtatccggagctgaatcattgtgtccactgcaaaagcggggaagggacgtttcatttttcgataagagataacggttttatctgccaccgctgctttgaaaaggatccgtacagagttccgatttcgccgcaaacggcaaggctgctaaggcttttttattactttgatatcggaaggctcggcagcgtctcgttaaaacaggaaaccaaaaacgaaattaaacaggtcattgatctgtattacgaggaatattcaggactttatttaaagtcaaaacggtttttagaccagatggaaagcatgaagaaccttttggatgaaaacaaaagttgacattctgcccatctttttatatgatcatttattataaaatatgttgcagtgacagaaagaagtacttgcgtccaactcatacaagcgaccttaggacagtgtaagctaaggatgagcgcgcaacgaaaggcattctcgagcaaccctttaaaaagaggctgagtgattcacatcctcagcaactagggtggaaccgcgggagaactctcgtccctatgtttgcggccggcaagcatagagacgggagttttttggttgccgccgcacttgtaaaagaatggagaaagtggaggtgcttgaaatgaacattcaagatatgattttaaccttgcagaagcactggtcgaatgaaggctgtgtgctcatgcagtcgtatgatgtggagaaaggcgcaggcacaatgagcccgtatacatttttacgaagcatcgggccggagccgtggagagtggcttacgttgagccgtccagacggcctgcggacggacggtacggtgaaaacccgaacaggctctatcagcatcaccaattccaagtcattattaagccgtcgcctgataacattcaagagctttaccttgattcattgcgtgcgctcggcattgacccgcttgaacatgatatccgtttcgtagaagacaactgggaaaacccgtctttaggctgtgcaggtctcggctgggaagtatggcttgacgggatggaaattactcagtttacatatttccagcaggtgggcggaattgaatgtaagccggtgtccgttgagatcacatatggtattgaacgtctcgcgtcatatattcaggataaagaaaacgtctttgatcttgaatggacgtcaggatttactgtgaaagatttatttatgatggctgaatatgagcattccgtttatacttttgaaacatctgacgtggatatgcttttccatttgttcagcacctatgaaaaagaagcgatcagacaaatggataacgggcttgtgcatccggcctatgattatgtgctgaaatgctctcacacatttaatctgcttgatgcaaaaggcgcgatctcggtgacagagcggacgggttatatcggccgtgtccgcaacttagcgagaaaagtggcaaaaacgtattatgaagaacgggaaaaattagggttcccaatgcttaaagaggagggctcttcccatgagtaaacaagacttgcttttagagatcggactcgaggaaatgccggcgcggtttttacatgacagcatggtgcagctcggtgaaaagctgaccggctggcttgctgaaaaaaatatcgcccacggcgaagtgaaactttttaatacgccgagacgtctggcagtatatataaaagacgtagcagaaaaacaggctgatattcaggaagaagcaaaaggccctgcgaaaaaaatcgctctggatgctgacggaaactggacaaaagccgctatcggattttcaaaaggccaaggcgccggagtggatgacctgtatataaaagatgtaaacggcacggaatatgtcttcgttcaaaaattccaggcgggacaagagacgaagacacttttaccgcaactggaaaatttgattgccggaatgcattttccgaaaaacatgcgctggggcacgcaggatctgcgctatatccgtccgatcaaatggattgccgccctctttggaaaagacgtcattccgtttgaaatcacaaatgtcaagacgggccggaacacgcagggacaccgctttctcggccaagaagtatctgttgatgcgccgtcatcatacgaaaagctgctgaaagaacaaagcgtcattgctgacccgaaagaacgcaaacaaatgatccaaagccagctggatgcgcttgcggccaagaagaaatggaacattccggtcgatgaggatctgctgaacgaagtcaaccatctggtggaatatccgacggcgctttacggatcttttgaatccgagtttctttctatccctgaagaagtgcttgtgacaacaatgaaagagcatcagcgctacttcccggtaaaagatgaaaacgggaatttgcttcctcattttattacggtgcgaaacgggaacagccatgcaattgaaaatgttgcccgcggaaacgagaaagtgctgagagcaaggctttcagatgctgcgttcttctacaaagaagaccaaaagctgaacattgatgaaaacgtgaagaaattggaaaatatcgttttccatgaagagctcggctcccttggagataaagtaagaagagcggtcaccattgcgggcaaacttgccgtccgcctgaaagcggatgaacagacgcaaaaacttgtgaagcgcgccgcagagatttctaaatttgacctggttacacatatgatctatgagttccctgagcttcaaggcgtgatgggagaaaaatatgcgcgcatgctcggtgaagatgatgccgtcgctgccgctgtcaatgagcactatatgccgagagcggccgggggagaagtgccttcaacctttatcggcgcggtcgtggcgttagctgataaactggacacgattgcttccttcttcagcattgacgtaattccgacaggttctcaggatccgtacggattgcgccgtcaggcaagcggcattgtttccattctgatcgaccgcaactggggcatttcttttaaagaactgctgtcgttgacagaaacggaaaaagagaatgagctccttgatttctttacacagcgtctgaaatacgtattaaacgctgaagacatccgtcatgacgttattgatgccgttctggacagcacagagcttgagccgtatgcagccgttcataaggcaagagtgcttgagaagcacctcggcacacccggctttaaagaaacggctgaatcactcggccgggttatctccatcagtaaaaaaggcgagagccgcgatatcaagccggatctgtttgaaaatgaacaggagaaaaagctgtttgacgcttatgaaaaaacaaaagacagtgtcgcggaaagctttgcctccaaaaactatgaacaggcgcttgccgtgctcagcggattaaaagagccgatcgaagattactttaatcacacgatggtaaatgcggacgatgaagcattaaaaaccaaccgtttagcgcaaatgaccgctcttgcagatgtgatcaagtcttttgctaatatgaatcatcttattgtaaaataaagaaaaagacggttgctgtgtgatcggcaatcgtcttttccccttttacataaacatcacagaatgaaaacatagataaagaaacccttccataaaggtggtgagtacgatcgaattaaataaacggcaagaacaaattttacagattgtaaaggaaaacggcccgattaccggagagcatatcgcagaacagctcaatttaacgagggccacgctgcggccggacttggccatactcaccatgtcaggcttcttagaggcccgtccgcgggtcggttatttttatacggggaaaacgggaaatcagctgcttgcggataaattgaaaaagctgcaagtgaaagattttcaatcgatccctgttgtcatcaatgaaaatgtctcggtatacgatgccatctgcaccatgtttttagaagatgtcggcacgttatttgtcgtagatcgtgatgctgtcttagtcggtgtgctgtcacgcaaagatttgctgcgggcgagcatcggccagcaggaacttgcctcaataccggttcatattatcatgacaagaatgccgaatatcgccgtctgccggcgtgatgattatgtgatggacatcgccaagtatttaattgaaaaacagatcgatgccctgcccgttattaaagatacggataaaggctttgaggtcatcggccggtttaccaaaacgaatatgactaagatacttgtcagtttatcagaaaatgaaatcatataagcttgaaaactaacgggggataacatggacaatcgcatcatttatgtagtatcagactcagtcggagaaaccgccgaactcgttgtaaaagcctcgctcagccagtttaacggctcagccgatgatacgcatatcagaagaataccttatgtggaagatatcggcaccattaatgaagtcgtgtctctcgccaaagcggacggcggcattatttgttttacgctcgttgttcctgaaatgcgcaaatacctggttgaacaagcggaaaaagcgaatgtgctgtattacgatattatcggtccgctcatcgataaaatggaatcggcttacggtttgaccgccaaatatgaaccgggccgcgtccggcagcttgatgaagattatttcaaaaaggtcgaggcgatcgagtttgccgtcaaatatgacgatggcagggatccaagaggcattttaaaagccgatatcatcctgctcggagtatccagaacgtctaaaaccccattatcacaatatcttgcccataagcgtctgaaagtggccaatgtgccgatcgttcctgaggtcgacccgccggaagaactgttcagcgttgatccgaaaaaatgcatcggcttaaaaatcagccctgataaactgaaccatatacgtaaagaacggttaaaatctctcggcttaaatgacaaagccatttacgccaatatcaacagaattaaagaagagctggagtattttgagaaaatcgtggaccggatcggctgccaagtcgttgacgtttcgaataaagcagtcgaagaaacagcgaacatcattcatcatctcaaaacaaagggccgataactcaggacgctttatcctgggtttttgggtatgcaaatagggaataaacaaaaaggatggcatcttcgcgaagtttgtattataataaaaaattgtgataaaatgtttatttttaggtttaagcttcgtgtgatacgaataaactattatgggtaagatgtcaagaataactcccggaaatttttcgacaaagctcaaaatagatccgcagtcatggagcatatgcgatttcgcttgtttttatgcaggagattgatggagggatggagaattagtcttctaaatgaaaaagaaaagacgatttttgtcgatgcagacgcatgccccgtaaaagaggaaataatgctcattgcatcgcaattcagcgttcgggttattttcgtcgcatcatttgaacactaccagctttccagaagcaaagacgagaactgggtatacgttgatcctcataaagaagcggcagatttatatatcgcaaaccatgtgagatcgggagacgtcgtagtcacgcaggatatcggtttagcatctcttttgctgaacagaaatattgccgtcttatcggaaaggggccgttcttatactgaagacacgattgacttcgctctgatgagccgtcatatgtcaggcaaaatgagaagaagcggcattcattccaaaggacctaaaaaattaaataaagaagatcggaatcgatttgttaccctgcttaaaaaaatcctgtcgaatgatgaagggatttcaaatcaaaacatcgaataatgtacgacggagtgttataagatgggaaaccgcataccagatgaagtagttaatcaggtgcagcagtcagcagacattgttgaagtcataggtgattatgtccaattgaaaaagcaaggccgcaactactttgggctctgtccgtttcacggggaaaacacgccctcgttttccgtctccagcgataagcagatctttcattgcttcggatgcggagcgggcgggaacgttttctctttcttacggcagatggaaggctattcatttacggaagctgtttctcaccttgcggataaatatcagattgatttccctgatgatataacgattcactctgcatccaggcctgaatcttccggagagcagaagatggaggaagcccacgagcttctgaagaaattttaccatcatttgctaataaatacaaaggaaggccaggaagcgttagattaccttttatcaaggggttttacgaaagagctcatagatgagtttgaaatcggctacgcgctggattcctgggatttcatgacgaaattcttgaaaaagcgcggttttgaggaagaaatgatggaaaaagcgggtctgctgatcagaagagaagacggcagcgggtattttgaccgtttcagaaacagaattatgtttcccattcatgatcaccacggagccgtggcggctttttcaggaagggcgctcggaagccagcagccgaagtatatgaacagcccggaaacgccgctgtttcataaatctaagctgctgtataactttcataaggcgcgcctgccgatcaggaaagaggagagagccgttctgtttgaaggcttcgctgacgtcatatccgccgtcagctcaggcgtaaaagaaagtatcgccacaatggggacgtcgctcaccgaagagcatgtgaaaatcctcagaagaaatgttcaggaggtcattctctgctacgattcggataaagccgggtacgaagctacgctgaaagcggccggcctgctccagaaagccgattgtaaggtaagagtaagcatgctgcctgacgggcttgatcctgatgattatatcagaacccggggcggagaaaaattccggaccgatatcattgatgcaagcgttacggtcatggcttttaaaatgcaatatttccgcaaagggaaaaacttatctgacgaaggagaccggctcgcttatatgaaagaagtgctgaaagaaatcagcgctctttccgggtcgcttgagcaggaaatgtatgtgaagcagctcgcctcagaattttctctttcggtagaatctttgacggaacagctttccatctacgccagacaaaacgcccccggcgacaaaaacgccgaaccgcagacaagacgggcccgggtgacgactaaagcgaaacggcgccgtctccgtcccgcctatgagaacgcggaaagacttctgctcgctcatatgctgagagaccgaaacgtcatcaagaaagtgattgagcgtgtcggctttgaatttaacattgacggacatcgtgcgctggcagcatacctgtacgctgtttatgaagagggtgctgacatgacgccgcagcatcttatggcgagaatgcaggatgaggaaatcagccagctgctttcagatatagggatgctccaagtaaacgaggagctctcagaggccgagttatccgattacgtaaaaaaagtgttggatcaccgaaaatggtcaatgataaaggaaaaagaagcagaaagagcggatgcggagaggcagaaagacttcgtgaaagctgcgtctctggctcaagaaattgttgcattgaaccgatcattaaagtaacaacaaatagaggcttgcgttctgattggcaatgattccttgcggaggagcaaatagatcgcttaacctcatcatgaattgtcattattatccgcagccctgcatgctgaaaaagagagaaggcttccgggtcggataagaaacataccgcttttagaattcgttgcaagctttggaaggagggatccataatggctgataaacaaacccacgaaacagaaacagaacttacattagaccaggtaaaagagcagcttactgaaactggaaaaaaacgtggcgttttaacatatgaagaaattgctgaacgcatgtccagctttgaaattgaatcagaccaaatggatgagtattatgaatttttaggagaacaaggtgttgaattaattagtgaaaatgaagaaacggaagatcctaatattcaacagcttgccaaagccgaagaagaatttgaccttaatgacctcagcgtaccgcctggcgtaaagatcaatgatccagtccgcatgtaccttaaggaaatcggacgggtaaatcttctttctgctaaagaagaaatcacctacgctcaaaaaattgaagagggtgacgaggaatctaaacgcagactggctgaagcaaaccttcgtttagttgtcagcattgctaaacggtatgtcggccgcggcatgcttttcttagacttgatccaagaaggaaacatgggtctcatgaaagccgtcgagaagtttgactaccgtaaaggatataaattcagtacgtatgcgacttggtggatcagacaggcgattacacgcgccatcgctgaccaggcgagaacaatccgtatcccggttcacatggtggaaaccattaataaattaatccgggtgcagcgtcagcttcttcaggatcttggcagagagccgacaccggaagagattgctgaagacatggatcttacgcctgaaaaagtccgtgaaatattaaaaattgctcaagagccagtttctttagaaacaccgatcggtgaagaagacgactcacatctcggtgattttatcgaagaccaggaagcgacatctccgtcggatcatgcggcatatgagcttttaaaagaacagctggaagatgtgctggatacgttgacagatcgtgaagaaaacgtgctgcgtctccgtttcggtctggatgacggacgcacaagaactttggaagaagtcggcaaagtgtttggagtaacgagagagcgtattcgccaaattgaagcaaaagcgcttcgcaaattgagacatccgagcagaagcaagcgtctgaaggattttctcgaatagaatggaacgggtctttttgatccgttcttttttatgtataagatatatggataatatacctttattttactggataagcatatgttttgcaaatgagtttggaaaaaatgcggcatgtcctgaaaggggggaaatgagacaagtttatttatattctttattgtaagcgtatacaattcattatacaatagaataaagataattttgtggtaagcaaaacagttatttttgctttttgtataaattgtgaaatcattgaaattgctgagcaagaccatttactttttgtaaaaataagttagaattagaagtgtttacataggggagaatgaaaaagggggatggagatatgaagtggaatccgctgattccttttttgctcattgcagtgctgggaatagggctgactttctttttagctgtaaaaggcaatggagatgcgcatcagatcgcaagcggcggtgaaagcaaaaatgccgagaaggaaactgcaaacgcttcacctgaagagatttataaagccaactgcatcacctgtcacggagaaaactatgaaggtgtgtcagggccgaacttaaaaggcgtcggcaaaagaaaagatgtcgctgagattaaaacaaaaattgaaaaaggcggcaacgggatgcccgcgggccttgtgccggccgaaaagctggatgacatggcaaaatgggtttctgacattaaataaagctttaccggtccctatataaaagacatatgaaaaactctatccgccgcttggattccgggcggtttttttatatgatagtaaaggaaaaagaacctgagaaaagttgtgatattgtgaatgaaatgaagttatcgaaaagattgcagtctgtggcggaatatatccctccgggtgccctggttgctgatatcgggtcagaccacgcgtatcttccttgctatgccgttttgaatcatttggcaagccgggcaatcgccggtgaaattacagacggaccgtttctatccgccaaacagcaggtggaaaaactgcacttaagcactcttatctccgtaaggaaaggtgacgggctgagcgtccttgaaaaaggagaagccggcgccattacgatcgctggcatgggcggagcgctgatcgctcatattttggagtcgggaaaaacgaaattgacagggcgtgaacggctgattctgcagccgaatattcatgccgttcatataagagagtggctgtatcaggaaggctatgaactgcttgatgaagtgattctcgaagaagacggaaagtgttatgaaatcctcgttgcggaaactggcgaccgtgatgcgccttatcgggatgtgccgatggctgtcggaatgcttgcgggtccgtttttgttaaaagagaggaatgaagtgtttcttcggaaatggagccaggaacttaagcatactgaacaaatttatgaacagatcagccgcagcgcaaagcatgaaaatcatgaaaaattagctgaattgaaagagcggatttctctgctgaaggaggtaatcggacatgcctaaacatgtgaacggacaggaaatcatccagctgtttgaacaattttcaccgaaggcttatgcggtggaaggagataaaatcggactgcagatcggtacattgaataagccggtgaaaaatgtcatggtgacactggatgttttggaacaaacggtagatgaagccattgagaaaaaagttgacttaattatcgcccaccatccgccgatttttcggccgcttaaacagatcaccactgatcagccgggcggaagactgattgagaaatgtataaagcatgatattgccgtatatgcggctcatacgaatcttgatgtagcggacggcggtgttaacgatctgcttgccgaagctctcggcctgacagacactgaagtgctcgtcccgacatattcggacccgatgaaaaaacttgccgtatatgttccgaaagactatgaagaagctgtaagaaccgcactcggcaacgccggagcgggacatatcggcaattacagccattgcgcgttctcttctgagggaatcgggagctttaagccgctggacggggcagacccgtttatcggacagacgggagagctggaactcgtccatgaagtgagacttgagaccgtttttccggcaagtatggagaaaaccgtcgtaaaagcgctgaaaaaaagccatccgtatgaagaggtggcatatgatatttatccggtggagcagtctccgcttgaaaaaggcctcggccggatcggaaaacttcagcaggacatgacgcttgaagagtttgctctgtttgtgaaagaaaagtttgacgttaacggagtccggatggtcggagagcgaaacagcaaggtgaaaaaggtcgcggttcttggcggcgacggaaataaatatatttatcaggcaaagcggaaaggtgcagatgtttacgtgacgggcgacctttattttcatgtagcgcatgatgcgatgatgatgggattaaacgtcgtggacccggggcattatgctgaaaagatcatgagaaaaggcacggctgagaagcttacggcaatggccggagagaaaaactatgacgtgcgcattttcgcttccgaaacagatacaaacccatttaccttcttataaaaaaactgaggccccgggcctcagttttttatttttactttcggaagaatttttttgagcggcacactgtgttcaagctgccatgtcgattcatcgttgtggtcaaactgctctaaaaagcggatgacttcctttgtaatcggtgtcggtgttgatgcgcctgcggtaacggcgacggtattgacgtctttcagccattcgagcttcagttcactgatgtctccgattcggtaggcttttgttccggcgatttcttctgacacttgagccagcctgttggagttattgcttttcggatcgccgacaacaatggttaagtccgctttttttgcctgctctgatacagcttcttgacgaacctgtgtggccaggcagatttcctgatggtattccacgtgcgggtacttttctttgactgattccataatatcgtggacgtcccactgggacattgtcgtttggtttgtaacgattaatttctcagcctgaatatcgagatttctgacgtcttcttctgtttcaacgagatgaacgatttcaggagcgacgccgacggctccttcaggctcggggtggccttttttgccgatgtatatgacatgatagccttcagcttttacttttcggattaagtcatgtgttttcgtgacgtccgggcatgtggcatcaatcgtaacaagccctttttcctcagcggcttttcttacttccggagataccccgtgagccgtgaaaataacggttcctttttccacctgctttaaaatctccagacggtttgtgccgtcaagcgtgtaaatgccgtcttcctcaaacgcatctgtgacatgcttattatgaacaatcattccgagtatatatataggtcttggcagtgttttatcgagtgacgcgtttttggctatgaccatggcatcaacaacgccgtaacagtagccgcgcggcgatattttgataacgtccaatgtagatgtcctcctatcaaaagtgagtgtagaggcaatataaaaagccgtagttaaacggctcaaatcttgcattcttctgatctcattatagctaatctttcgtgagatatcaaagaatgttaaatatataatttcggctttgatctgcccgatgttctttttggacgcggctgttccgctgagtctgcctgtgcggcgtctttttcttttgaagcggatgctttttcagacgtcttctttgatgtgttggatgaggcgtctgatttgttttcatcttctgtttcatctgttttttcagcttcatcctttttatcctgttcgtttgtttcttttgtctcgtcagattcattctcatcatcgctgctgcttaattggctgtaaagcttcatcatggcgggcagactccgtactaaaggaccgtactgctgaatcatcggtgtaacctgctgcgccacgccgagcaccttctgaacgttgccgagcatgctcgacagggatgccggacttgccaggttctgtattccctgcagtcctgcacctgctcctccgctggccgccgccggtgccgacgcggcagcgcttcctcctcctgaaccgggtaaaaaacgggaaagcatcccttttaagccccctccgccgcccgtgcctgcgtttctcaggcccgctccggcaatctgctgctgagggaaaagctgccggccctgctgcatcagctgccggcccggcaatgacggtcttcctcccatcatcatacgcggattcatcaacggccggccctgctgcgccatatttctcatcggctgctgtggaaacatacttgtacctcctttctgtctctctgctattacaatatgcatcggagggggcatttgcttttctgtctcgaaaacaggattcccccaagacatggtgtttttaagtaaaatcggttataatgtgatgatggacacagaatgtgccgctttaaggagctgggaaaaatgaaagaaactaaatttgatggatacaacttaaaaccgtttattatagatgcagttcaccgccttggtttttatgaaccgacagatattcaaaagcggctgatacccgccgtgctgaaaaacgaaagcgtgatcgggcagtcccagacggggacggggaaaacccacgcctatttattgccaattttgaatcggattgatccgggttctgatacggtgcaggctgttatcacggcgccgacgagagagcttgccaatcagattcatcaggaagcgctcaaaatcacacagggtgcggaagatgagccgatccggacaaaatgtttcatcggagggacggacaagcaaaaatcaattgataagctgaaaacacagcctcatctcgtcgtcggaacgccgggccggatcgcggatctgattaaggcgcaggcattgaacgtctataaagcgcagtctctcgtcattgacgaagcagatctgatgcttgacatgggctttttagaagatgttgattatatcggatcgcggatgccggaagaacttcagatgcttgtgttctcagctacgattccggaaaagctgaagccgtttttgaaaaagtatatggaaaatccgaagtacgcgcatgttgagccgaaaagaatcacagccgaaaagattgaacatgttttggttccttctaaacagcgtgataaagacaagctgctttttgatatgatgtctcatctgaatccttatctgggcattgtgtttgccaatacgaaaaacacggctgaccatattgcgaaatacctgactgaaaagggcatgaggatcggtcttctgcatgggggattaacgccgcgtgagcgtaagaaggtaatgaagcagattaatgatctggaattcacttatgtcattgcgacagaccttgcggcaagaggaattgacattaaaggcgtaagccatgtcatcaactatgagcttccggacgatctggatttttatgttcaccgcgtcgggagaaccgcacgcgccggttcatcaggccaagcactgaccatttatgagctttctgacgaagatgcgctcgtaagactcgaaaagatgggtattgtgtttgactatgcggagcttgtaaacggcgaatggaagaaaggcgatgaccgccaccgccgcaaaaaacgcaaaaaatcggagaatgaggccgaccaaatggcgaagcgcctcgtgaaaaaaccgaaaaaagtgaagccgggctataaaaagaaaatgagctacgaaatggaaaagataaaaagaaagcagagaagaaacaaatctaacaaaggaaagtaggggactcgggttgctgaaaataggttcacacgtctcaatgagcggaaaacatatgctccttgccgcaagcaaggaagctgtttcgtacggggcgaatacatttatgatctatacgggcgctccccaaaacacgcgccgcaaaaaaattgaagacttgaatatcgaagcgggccgcgcccatatgaaggaaaacggcatcgatgagattgtcgtgcatgcgccgtacatcattaacatcggaaatactacaaatccggcaacgtttgagctgggtgttgattttctgcgttctgaaattgaaagaacggcagcaatcggcgcgaaacagatcgtgcttcatccgggagcgcatgtcggagccggggctgagacgggcatcaaaaaaatcattgaaggtttaaacgaagtgattgttcccggtcaaaacgtgcagattgcgctggaaacaatggcgggcaaaggatcagaatgcggaagaagctttgaagagctggccgagatcattgcggggttacgcataatgaacatctatccgtctgctttgacacttgccacacccatgacgccgggtatgatgtcgccaatgattttgacggtgttcttaacgagtttgataaaatcgtcggcatcgatcggataaaagtccttcatgtgaatgacagtaaaaatattaaaggcgcccggaaagaccgccatgaaaatatcgggttcggagagatcggttttgacgctctgcagtacatcgttcatcacgagcagcttgccgatattccgaaaatcctcgaaacaccgtatgtaggcgaagacaagaaaaataagaagccgccgtaccgttttgaaatcgaaatgctgaaagaaaagcagtttgatcaggagcttcttgaaaaaatatcagctcaataaaaaaggagggggaattgccccctccttttttaccctgagaattggttgaaaagttcgtcaactttccgagctgtttcttttgaggttatcgtttctacttttttcagcaggcgaagccgctcctgttcatcaaaaatattgatgttttttccgtgcatcagagccgctacctcagccgcttgacttctcgtaatgctgattccgtattgcttggaatatttcagaagatcgtccgcagtgacttgattgagccgctgcaaaataattctttgtattaaaatcatcgatactttcacctctttagacataatgtattgagcaaatcattaaaatgttacggcttttaatggtaaaatgaagttgcttactgtttaaaatagttattacaggaaaggagattttatgaccccaaataaacagcataaaagagagtcatttttacactttatcttcagggtcattatgattctgatcggggcgggttcagccgctgtaagtattgaattgtttctggtccctaataattttatcgacggaggcattatcggtgtttcattaattttagaccacctctttatgtccaatcccctcctcaatttcgccttattcgttgtgttactcaacattccatttatgattttcggatataaatatatcggaaaaacatttctcatctctactgttatcggaattgtcggtttagcgctgattgaatcctccttgcaccatgtggaggccattacgacccagcctattttggcgacggtattcggcgggcttttgctcggtttcggggtaggccttgtcatccgaaacggaggctcgatggacggtactgaaatactcggtatccttctcacaaaaaagctgcccttctcagtcggagaattcgttatgctcatcaatgtgtttatttttatttgggccggttttgtgttcggtccggagcaggcgatgtattctttcatgacttattatattgccatgaaaacgattgacgccgtcatccaggggcttgatgaaacaaaagcggtcattattgtggcagatcagtatgcggaaatttcagacgcaatcttgcatcggcttggaaggggaaccaccaagcttcagggaaaaggcggatatacggatgaatccaaagaagtcatttacgcggtcgtgacaaggcttgaagtgactaaattgaaatccattgtgtttgaaattgataaaaacgcctttattacgatcatgaatacccatgaaacgaggggcggtaagttcaaaaccgcgattcactaggctttcatttacttttcatcattttataggtataatttgatacatcataagaaaatggcctgctgttcagacagctgccattttctttttggagcgataccgtgttgtaaaggggaggtcctcatgaacgtacaagaagcgttgaacctgctgaaagaaaaagggtataaatatacgagtaagcgagaagacatgctgcagctttttgctgattctgataaatatctgaccgccaaaaacgtgcttgccgcattaaatgacgactatccgggtctgagttttgataccatataccgaaatctttcgttatatgaagaactcggcattttggaaacgacggagctttccggagaaaaactgttccgttttacatgctcttatacccatcatcatcaccattttatctgtttaacctgcgggaaaacgaaggaaattgagtcctgtccgatggataagctgcacgatgatttggaagggtatgaaatcagcggccataagtttgaaatttacggcacctgtccggcgtgccgataaaaaacctcctgctatatacaggaggtttttttcagcttttaacatgctgaaagctgtgtttgtttttattaatccaggcgacggcttcaagccaattatgcaccctgataatattggaatcgatggggagctgattatatggggagttaaaaaggataaccggaatgcctgcttcttttgcgatcattgtcgcgttgccgtggtgatcttcgaaaaataaatcaatgccgtgttttttgacggcttccactttgtgatggcctccgacaagctcaatgtgatcgtaatgaatgtcccggtttgcaaaccagtccagcgtaacatcttctaagtggccgcgtcttgccgtaatgtagataagacggtgctcttctttcagtccgtccagtgcctgcttggcaaattccgcgagcttcgcttctttatatatggctgcttcatgaacgttcatccattcccaaaattcctcgtctgtaatgttcaaaagcttcgtcagatcataatcagtcatatcatccaaggtaatggaaagatgaaatgagcggtttaaataagggacaaatgtatcctgtgccgtaactgtgccgtcaatatctatacctaaccgtaacatgtccacactcctataaattcatcccttcaagtgtaacataaacaattaacaataccagaaaagtttagcaaacatgaatccgtaaaaaacgcggaaactaaaaaagctcctttcataaaagaaaaagggggaattgaaggtggcatacgattacgaaaatcgaaaaggcaacgactattacgtggatcatggatcggaaggaaccgatatcacgcgtgatgtttattcagaagaaacagcggccgaaatctcagagccatatcgtgcttctgaccgggcagcagaccgtgatgataatcgggacggagtaagtgaaggccggggatagggtatgcagcattggctatttctatcatttccctgtttgtgctccctgttttattaggggcatgcggcattatcgtcggctatatcgccagaagaagaggagcaggcgctttaggcggatgggcgatgggaatcggtattgtttcccttgtgcttggcatcttcattacaccgtttttttaacacaacgcaaaaaaaaagcttggcggaatatccgtcaagctttttgtgtttcttgttctgcttttgctttttctgcttcaagctttgcatagtgttcttctgccagcttgtcgatttcttttttgagctcttcgaccattgtttcttcagggactttgcggacgatttggcctttgcggaaaagaagtccttcgccgcgtgcgccggcaatcccgatatcagcttctcttgcttcgcccggtccgttaacggcacatccgagaaccgctactttaatcggcgctttgactttagaaatgtattcttccacttcatttgcgatgctgatgagatcaatttcgatccgtccgcatgtcgggcatgaaataagcgtagccgcgtttgaagcaagaccgaatgatttcagcagttctctggctacttttacttcttcaacaggatcggcgctcagagagatccggagcgtgttaccgattcctttgcttaaaatcgctccgagtccggccgcgctttttaccgttccggcaaacagcgtgcccgattctgtaattccgaggtgaagcggataatcaaatgcttttgacgctttttcgtatgcttctatggcgagattgacgtcagacgctttcatactgacgatgatgtcatgaaagtcaaggtcttccaggattttgatatgatgaagcgcactctcaaccattccgtcagcagtcggatagccgtatttttctaaaatgcgcttttccaaagatcccgcgtttacgccgatccggatcggaattcctttttctttcgccgcttttacgacggcttccactttttcgcgacggccgatgtttcccggattgattctgattttgtcggccccgccctcaattgcttttaatgcaagcttgtagtcaaaatgaatatcgacaacgagagggatggaaatttgttttttgatgtcggcaatcgcgttagcggcgcgttcgtccggacatgccacccggacaatttggcagccggcttcggctaaacggttgatttccgcaactgttgcttctacgtcgtgtgttttggtcgtcgtcatactctgaatgacgacttcgttatttccgcctattgttaaaggtcccactttgacgggacgcgtttttgtacgatgtgtgatttcactcacttgtcaatcgctccttaattgtagttaccgcttttgcaggctgagccttttacatgtcaggcaacttctatttacatgttatattgtaacagtgtatttgccgaactgacaagaaattaacgtttaattgcggtagacggggaatttataagcggtgcctgcctgaatggcgtttgcttttacattcggattcagcgcttcaaaatcttgtgcaatatcatctggcgctttatgtgcgccgactatcgacatcaccgtatcgccttttttgaccgtaaccgttctgtatgaagcttcctgttgggctggctgtgccgccgctgcgtatgctggaaggtcttgagaagggatcgtgccgattttaagatcgtaaaagataatgaatatcacaaataaactgccgaatacaaaagtaagccgcttcattccaaccgcctcccgcatacatttttacttcattgtatgcttgtcccattttgttcatgacaaaaaagaagaccgccgggggcagtctttgttatacatctgttttacttcgcggtatctcttttaagacgaggaaaaggatgataaagtttacaaaccaattcactaaaaattcactcggcaccgtaataacaagcgcgcgcatgatcgtaaagaatacggtcgaaagtgtaatggaataagccgaaagcttccagagctgctggtaattcaatgtctttctttgcgcatttttcaatatcaggccgatgacggcgagaaatgatacttcaatgaatttgcctgccgctgtcatgatgaacagcaaaacggacaggacggtgacgatcattgttttattttggtttaatgctgatatgatttctttttttgtgatatcggcaggcatcagcgaataattcatttctgtcgcttgtccgtctacagcaagcaccattttatttttcaaaatgccgatcgcattttgtttcgccgctatttgtttcgcgccgtaagcatctgtgggatcaaagacgatgacgaacccgttcgcttccgtttccttagaggcggacgctttcgtctgcaattctccgtttgaaatgctgaaatcagggaaatctttctttaacacggttttgaaaccgttcattgagtttacggtgccggagcaaaggtaataagcgcttggcagcgtaaaaaggacagacagcaaaaatacataaaggatcgcttttcctatcccctgaaaccgtgtttttgcaatatctgccggagagtatgtacttttcaataaagccgtaaatatgttcaacatcttcacttcctagcctaaactggtatatgttgcttattgtatcgttcacaggggatgaacacaagtgagagtatttaaagcggtgataaggaatcatacataataagataaagcgggaagcggtgatcgcccgcaaaacaaaggagggtgtttttgtcatgagtgttttgtattggctgattatcattgcggtcttcatcattgcttttatcgggcttgtatatccggtgattccaagcgttatttttattgtggccggttttcttctctacggatttttgttttccttcagtccttattcttacctgttttggctcattgaggcggtatttgcggccgttttattcgcagctgattatgtgtcaaatttacttggcgttaaaaggtacggaggaagcagggcggcaatctggggaagcacgatcggattattgatcgggcccttcgttattcccgtggcaggcattatattagggccgtttatcggtgctgtctgcgctgaggtgtttgttcatcaaaaggatatcaagtccgcggcaaaagtggggctcggctcgttaatcggttttttaacaagcgtggcggcaaaaggcgtcattcagctctttatgatcggatatttcttatggacggtgctttagaaaggtttaatttcggcagggaacggataaagtgtaatatgtctgctggaatcgccggattgtgagctttttcattgattaccatgctttcttttgttacattgagattagaaaagttcgcgttaagcggcatttcagtacatatatttaaaggaggaaaaaaattatggcttacaaacttccagaattgccttacgcttatgatgctttagaacctcatatcgataaggaaacgatgacgattcatcatacgaagcaccataacacatacgtgacaaacctcaacaaagcgatcgaaggatcagcgcttgcagagaaatctgtagatgagcttgttgctgatttgaacgcagtgccggaggacatccgcacagctgtccgcaacaatggcggcggacatgccaaccactctttattctggactcttttatctccgaacggcggaggcgaaccgactggtgagcttgctgaagagatcaaaaacacgttcggaagcttcgatcaatttaaagaaaaattcgccgcagcagctgccggccgtttcggttcaggctgggcttggcttgttgtaaacaacggcaaacttgaaattacaagcacgccaaaccaagattcaccgctttcagagggtaaaacacctgtcctcggtcttgatgtttgggagcatgcgtactacctgaactaccaaaaccgccgtcctgattacatttcagctttctggaatgttgtgaactgggatgaagttgcccgtctttacagcgaagcaaaataaatagttcgatcaaacaaggtctcccgcgggaggccttgtttttttattgactttgaatccttttacatatctcagtttgagtgagacaaactaatgtgtagtaaaggggagtcaatgatgagcaaaataaaaaaaattatcggcgacatcgaaataaataaagggctgctgctgttattgacgattggcggcctttactcattgggcatcgcgctgtcaaatacatttgtcaacgtgtatttgtggaagcagtcgggaaaatttattgatttggccatatacaatttgtcggtcgtaacgatgcagccggttacctttctgctggccggccggctggctaaaaaaattgacagggtgtttattctcaggttcggcgttatctttttggccgctttttatttaagtgtgctgcttgctggagaaactgcggcttcccgtctcgttttgataggggccgtgctcggagttggatacggcttttactggctggcttttaatgtgctgacgttcgaaattacggaaccggaaacgagagatttttttaacgggtttttaggcattttgtcttcatcggcgggcatgatcggtccgattgtggccggatatgtcatttcaagacttgaaaacaatacgggttatacaatcattttcagcctgtcgctcggcttatttgcccttgccgtggtcatgagcttttttctgaagcggagggagtcgaaaggccggtttatgctgaaaaaagtttttgatgagcgccacacgaatctgaattggcgccggattaccaacgcgcacttttttcaaggcttgagagaagggatttttgtttttttaatcagcgtttttgtattcattgcgacaaacagtgagctggcgctcggaacattcggtctcgtcaattccgcggtttctttttttgcctattattttgcatcaaggctcatcaaaaaaagagctcggaaaaaggcgattcttatcggcggattgatcttgtacggtgccctgtttcttatcatttttaaaatgagcttcacgacgctccttttgtacggagtgtttattgcgatcggctatccagttctgctcgtgccgtatgtctcgcttacatatgatgtgataggccgggcgcggcttgccagaaaagccagaattgaatacattgtgctcagggagttatttttaaatgcgggcaggatcgtttccatcctttgtttccttgtaatcgttacattattcaaggaaaaagtgggaataccggcggcgctcgtgctgctcggagccggccatccgctgatttattactttataaaagacatcagactggatacggaaacttctgatgaaacagtagaagaagaccgacaaaaacaggcggcggaaccgaattttataaaaggagaaagataaaagggttatctgtagaaaaatatcgaaaaaacctttagaatgaaaaatgacacctgaacagaaggtgtcatttctttctgtaaataagaaaaggtgatgtcatgaggagaaataaaaagaaaatagctgtaaacaaagaaaagaaaaaatcactgccgatccggcttaattttttgtttttggccgcgtttcttattttcacttggattatcgtcgagcttggcatcaagcagatcgttcagggtgatgattataaaaacgccgctaataagcaggaggagtctgatgtcagcacggcggttccgagagggaaaatatacgaccggaacctaaatcccatcgtaacgaataaagcattaaatgcgattacatatacacgttcagcctcaaccacccaggcgcagcgtttaaaaatcgcaaaaaaactgtcgggtatgattaaggtaagcaccaaaaaggtgactgagcgggataaaaaagactattggatgttaacgaggcctgatgaagcgaaaaaactgattacggccgaagaaaagcaaaaagctgaagacaaaaaactgtctgaagatgatttatatcagcttcagctgaaacgtatcacagacaaacagctgaatgagctcacttcaaaagatatgcagatccttgcgatcaaaaggcagatggattcaggctactcactgacgcctcaatacatcaaaaatgaaggggtgtcggcaaaagaaatggccgtcgtcagcgaacatttagatgaactgccgggagttgacgtgacgtctgactgggaacggtcttatccttataaaagcctgatccggacattgctcggcagtgtatccagtgcgaacgaaggtcttccttccaatctgctggatcactatctgtcactcggctacagccggaatgacagggtcggaaaaagctatttagaatatcaatatgaaagcctgctgcagggtcaaaaagagaaagtgcagaacttaaccgactcatccggaaatgtcacgggcagcaaagtgatttcaaaaggacaggccggcaaagaccttgtattatccattgatatggacctgcagaaatccgttgaaaaaatcattgagaaaaatttaagatcggcaaaagcgagaccgagcacgaagcttcttgatcgggccttcgtcgtcatgatgaacccgaaaaacggagaagtgctgacgatggccggcaaacagattacgaatgatcatggaaagtacaaaattaatgattatgccctcggcgcaatgacttcctcctacgcaatgggatcggcggtcaaaggagcgacggtgttgaccggactgcagacgggcgcgattaatttgaacaccgttttccaggatgaacctatgtatttcaagggaagtaaaaacccgaaaaaatcatggaccaatttaggtcccgtagatatccaaaaagcgcttcaggaatcctcaaacgtgttcatgttcaaaacggcgattgctgtcggtaaaggggagtacaaaaaaggccagtcccttccgcttgatatgaaggcattcgatactttcagatactacttcaatcagttcggactcggagttaagactgggattgatcttccgaatgaagcaaccgggtaccaagggacacagcgaatttccggtcttctgttagactttgccatcgggcagtatgatacgtttacaccgctgcaaatggcgcagtatgtatcaacgatcgccaatggaggctatcgtttgaaacctcagcttgtaaaagaggtcagacagcctgattcgaaaaaaggaatcggagccgttgtagagtctgttcagccccaagtactgaacaagattgatatgaatcatgcagacattaaagaagtgcaggcaggtttcagacgtgtcatgacaaaagggacagccgcaactgattttgcgacggcgacatacagtcctgccggtaaaacgggtacggcgcaatctttctatgacggtcctgacaaatcagagacgggtgaaggaacgtataatacgactcttgtcgcgtatgcacctgctgataatccggaagtggctatttctgtagtcgttccttgggcctatattaattacagcgatcgatattcgattacgaatgatataggaagagcagctctggacaaatactttgagctgaaaaagaaacaagaagataataatacgaagcagaaaaacgaagataaaattcaggaagacgctgaaaacggcaatacaagcaactaacagaaaaacgctcacaacctgtgagcgttttttttatacaaaaaaacatccggatttacaaaaccttaacacttgatttatacgcattttacaagaaccctttactctatacgtgtaggacaaattacacattaaatgcagggggaattcaggaaatgaaaaaaaacaaatggatgcttatgcttctgatggctgctgttatgattgttgctgcagcatgcggaaatgcaaaggaaagcggcaagacagacagtcaatctgcaagtgaggataaaaaagcatcaggttctttaaccatttctggttcatcagccatgcagccgttagtactggcagcggcggaaaagtttatggaaaaacatccggatgctgatgtgcaggtgcaagcgggaggttcaggaacaggactttcgcaagtgtctgaaggggcagtgcaaatcggcaactcagatgtcttcgctgaagaaaaagaaggcattgatgcgaaagccctaaaagaccaccgagtagcggtagtggcgatggcggctgcggtcaaccccggtgcgggcgtaaaggatataaccaaaaaacagctgacagacgtctttacaggtaaaattaaaaactggaaagagcttggcggtaaagatcaaaaaattacactcgtgaaccgtcctgattcatctggaacacgcgctacgttcgtcaaatatgctcttgacggagcagagcctgcagagggcattacagaggattcctccaatacagtcaaaaaaatcattgcggaaacgccgggagcaatcggttatctggcattctcttatataaacgatgacaaagtaacgcctttatcgatcggaggcatcaaaccggaagagaaaaacgtcgtcacaggcgagtatccgatttgggcttacgagcactcttatacgaaaggtgaagcgtcaggccttacaaaaacgtttcttgactatatgaacagcgatgaagtacagaaaagtatcgtaaaagatcagggctacattccgatctctgatatgaaagtcacacgtgacgcaaacggcaagcaaagctgaggggagggcgggctccccgcctcttcttctttataggagtgtaaacaaatgataaatcacagagaaaaagagtctgtaagcgaacgcttaataagctcaaaacaaaacaggcaattggatgaagtccgcggaagggtgattgtgtctgtgtgtgccgcgattatcattgcggcatcagcggcgatcacaatttttctcggcataaaggggctgcaatctttttttgtaaatggtgtaagcccgattgagttcttaacaagtctgaattggaatccaacccaggcaaaacctgagttcggcgcgctgccttttattttcggatcatttgcggtcacgattctgtccgctctgatcgcagcgcccctcggtattgcgggtgccgtgtttatgacggaaattgcgccgacttggggaaaaaaggtgctgcagccggtaattgagctgcttgtcggcattccgtccgtcgtttatggattcataggtcttacagtattggttccgtttatcggctcttttaaatcaagcggaacgggtcacagccttctggcggggacgatcgtactctcggtaatgattctgccgactgttacatcgatttccgctgatgcgcttgcgtcacttccgaaacaccttcgcgacggttcatatgcgcttggggcgacgaggtggcagacaatcagaaaggtgcttatcccggcggcgtttccgacattgctgaccgctgtcgtgctcgggatggcaagagcgttcggagaagcactcgccgtacagatggttatcggaaatacaaagcttctgccggaaagcctgcttgatacggcgggaacattaacgacgattatcacgttaaacatgggccataccacatacggcagtattgaaaataatacgttatggtctatggggcttgttcttctcatcatgtcgtttctgtttatattgctcatacgctacttgtcatctaggaggaaagtgtaatgaaccggaaaataacggataaattggccaccggtgtattcgggttatgcgccgctgtaatcgcggcgattttggcaggattgtttttgtacattcttattcacggcgtctctgaaatctccttgcgttttcttacgtcaaaatcgagcgccattgcctcaggcggcggaatacgggatcagctttttaactccttttacattctgtttatcaccatgctgatcacgataccgcttggtgtggggggcggcgtctttatggctgaatatgcgccccaaaataaaatcaccgattttatcagaacgtgtattgaggtgctgtcttcgcttccgtccattgtcatcgggatgttcggcatgctgatgtttgtaaacctgaccggatggggctacacgattatcgggggcgcgctcgcattaacggtctttaaccttcccgttatggtccgggtgacagaaggcgcgctcactgcagtccctaaggagctgaaagaagcttctctcgctttaggcgtatcgagatggcataccgtcaaaacggtgctgattccgagtgcgattccttcaattttaaccggagccattctggcatcaggaagagtattcggagaagcggccgcattgttatttacagcggggctgacaacgccgcggctgaactttacggatttgaacccattttctgaatcatctcctttcaacattttcaggccggctgagacgctggcggttcatatatggagtgtcaatacgcagggaatcatccctgacgccgaagcgattgcaaacggcggctcggcggtgctggtgatttcggttctcttgtttaacctttctgcgagatggctcgggtctgtcatttataaaaagcttacggcaaattaatcggaaagaggcgaaaacatgatcgatcacatcatcagggaacaagcggaacagacaaagcgtttgccggagtcttcgattttggaagtgaagcatttatcaatttattacggtgacaaacaagcggtaaaagatgtaaacatgaatattgaaaaacatgcggtgacggctctgatcggtccgtcaggctgcgggaaatcaacatttttgagacagattaacagaatgaacgatgccattgcttcggcaagaagcgagggagagatcctttatgaagggctgaatattttgggtgaagcgattaatgtcgtgtctctcagacgggaaatcggtatggtgtttcaaaaaccgaatccgttcccgaaatccatttacaataacatcacacatgcgctgaagtatgcgggggaacgcaggaaagccgttttggatgaggcggtcgaggaaagcttaacgaaggcggcgctttgggatgaagtcaaagaccggcttcattcatcggctctgtcgttatcaggcggccagcagcagcgcctttgtatcgcccgtacgctggcgatgaaacctgccgtgcttcttttagatgaaccggcttcagctctggaccctatttcaaacgccagaatcgagacgcttttgacagaactgaaaaaagattattcgattattatcgttacgcataacatgcagcaggcgctgagggtgtctgaccgaacggctttctttttaaacggggaagtggtggaatacgggcagacagaacaaattttcacgagtcctaaagcgcaaaagacagatgactacattaacggaaagttcggatagggggaaggactgtgagtcttgtgaaggaagcggtgcacacacagaatttatttgatattcacggcatgaacgtatggtacggagcccatcaggctttaaaagacattacgatcggttttgaggagcggaaggtaactgcgatcatcggtccgtccggctgcgggaaatccacttttattaaaacattaaacttaatgctgcaaatggccccgaatgtcaaagtgacaggcgacatgatctataacgggcgcaatctgctgaaggaaaagacggatgcggcagaattaagaaaacagatcggtatggtgtttcaaaaaggcaatccgtttccccagtcaatatttgagaatgtcgtgtacggtccgagaattcacggcgaaaaaaataaaaagaaactgcttgaaatcgccgaggaatctttaaaagcagctgcgctctgggatgaagtgaaggatcgccttcaccaacaggcgctttcactgtcaggcggtcagcagcagcggctgtgcatcgcaagagcgctcgccaccaaaccggacgtccttctgatggatgaaccgacgtccgctcttgatcccgtgtccacgcggaaaatagaagagctgattttgacattgaaagaaaagtatacaatcgtcattgtgactcataacatgcagcaggctgcgagggtctctgatcaaaccgcgtttttctatatgggcgaactggtggagtggggcgatacgggcaaaatattttctcagccggatcatcaaaaaacacatgattatatcaccggaaaattcggatgaaaaaaacgggcccggccattaaccgggtccgttttatatgtctattaaaaaagcctgccggccgtatccatctgaatggacgatgcctgcaagcttttttagcgggttaatgttttgacgatttttttaaagctcatatctgaatcgactttgaaatggccggcgcggatttctttgtggtagcctgcgtcaatgacgtaatcattgaagtctttcgctgaaggaataatcccttctttttcaagaatggatgacacatcagcagtgctcattccgtctttaatcgtcagtttgtatgttacttttttctttttggcgtctgtgttttggtcgttgtttaacgatttttctttagaatcaagcagtttttgatagtcatcccggttgacggagactttatgctgatcgtcgaggtagctgtttacttctttttctgtcaatgctgttttttcggttttaacggcggctgcctggtcatggtcagtcaaatagaagacagcggcgagaacggccgtcgctaaaatcatgcctgctgcaaaagcctgaatgccccgttttgtcatacgagcaccttctcattatctttaataatggtattgacgtcctcgacagacacgtgctccgcttttgcgatggcttccgcagacattccgttgttatattttgaaatgatttgtttggcgattttttggtttatgccgctgcttttggctttgcggatcacgaggttggtttccagcaattcttcttcaagcaccgtcattttctttttcaacttgtaaatttcctgcatggcggaaagctgaagcgtttctagctcctgttccacgtctttcatcggatctctttgagaatatgagaatgcaataagcgctatactgacgataaacaacgcaataatagcaatttccacgtttcatcaccttctattattaatttgcccttcttttttataccataaaacgccgccattctaaaggaaatagagaaaaaaacggaattttgtcggaaaatcttttttactcggggagcaaacggttatttctctatagatttcgtatcagaaagcccttttttgtcctgtttcgtcatattttaccttcttctgacgcaagctcattcagaggatcagaagcgtaaactgatgttttctgcacttaaacaacatttcatgtaaatcagctctagcattccgtccattatagtggtattatatataagtctgaataagtaaatgatatttagtttggagggaaaataatgcgcgttaatattactttggcttgcactgaatgtggtgagcgtaactatatttctaaaaagaacaaacgcaacaatccggaccgcgttgaatttaaaaaatattgcccacgtgataaaaaatctacgttacaccgtgaaacaaaataagctgtttaacacagcggaaaaagctggagctttcaataaagttctggcttttttgtctttcagggaggtttgagaaacgtgaaagcacaaatcagaaccgatataaaagcaaagctttctgacatgacagaaagtgaatgggagaaaaaatgccgcagcatgcgtgaaacgctgttttctttaaaagaatggagacaggcccgcgtgatcgccgttaccatctcgacacgcctggaaattccgacacggccgattattgaacaggcctggcaagagaaaaaacaagtctgtatcccaaaatgctttccgcagacgggagcaatggagttccgtacattttctgcgtatgatcagctggaaaccgtatatgcgggcctcagcgaaccgatcgagagtctgacggaaaaagccgcccaaaatgacattgaccttgtgattgtgcccggcgtggcttttgaccgggaaggcttcagaatcggatacggcggaggatattatgatcggtacctgtccggttataaaggccgtaccgtgtcgcttctctttgactgccagctgacagaccgcattccccgcatgccccacgatattccggtcgatatgatcgtgactgaatctgaaaccatcgcttaatcgcataaaaaactttttgcaccggaataattctcgctgtttgacaaacgataggggcaggagggataagatgaaaaaattgttgatctactcattatgcgccgtatctgttttagccgtttaccaaaaccgctaccgtctgatgaacagcgtgctcagccagccggggatcagacggacattcattcatttctttttaaaaataccgtttatcagaaacaaattcattcagcaggcattttaaacaaatcccgttttttaagcgggattttttgcataagaaaacctgccggtaaaaaacggcaggttttctcgtattgtcagctttttttcaggaaaccgagcagaattgagattataggagaaatgtacaggaaaaaggtaaacggcaggtagtcgacgacggaaacccctaatgcgcttgccataaaagcgccgcttactccccagggaatcagcgggttgatcaaagttccgccgtcctcaagcgaccgcgcaaggtgaatccgcttaatgccgagcttgtcatataaaggtttataagattgacccggaattaagatcgacaaatactgctcacctgtcgcaaggtttacgcctatacttgagaagacggtcgccatgacaagacgtcctttcgtatgcacgccttttatcaatccttgaagcagcgccgcgatcaggcccgttttttccatcaggccgccgagcgcaaaggcgatcataatcagagagactgatcccatcatcgattggagcccgcctctgttgataatgctggccacagcctggtcgccggttttaaacgccgtcccgctttgcagggcggatataaatccttgaatgctgctgtcaggaataaaaacagcagtcagaagccctgcggaaataataccggcggtaagcaccggaatcacggaaacccgtctcacagctaaaatgatcactaacagaggtgaaagaagcgaccaaggcgtaacgtgcacggcctcttttattccggaaatgaccgcctcaatattttgcgttgaagcggcatttattgaaacagatgaaccgagaatataaaaaagaacgatcgtgatcagcagtgccggaacggtggtgcccatcatatggcgaatatgcttaaaaatcggaatttcgccgattccggcggcaaaattcgtcgtgtcggacatcggtgacattttatcaccgaaacaagctccgcaaataactgctcccgccgtccattcgagcggaactcccgccgcgcttgctacccctaacagcgcgacgccgattgtactgacagttgtcagacttgagccgacaagcgtgctgataatcatgcaggaaaataatgcggtcaaaagcagctgactcggctgtataattgacaaagcgtaaacggtgacggtgggaatggcgccgctgtacatccaggcgccgatcagcacaccgatcaaagccagcacgataatcggctgcaccccgttttttaatccgctgacaattcctttttcaagactctcccacgagaaaccgagccacaaacctgccagagacagaataatgacgcaaaagaacagcggcatatgcggctctgtatgaaagaaaaacaggcaggaaataatgactgctaacatcaagacaaataaactgatggctgagatgaacgtcagccttttttcttgtttcaaaacaacaccccatcaaactttaatccttttgtgcttttgggcacgaaagtattgtaacagaaaaacgcataaatgagtgtttttttacaattgtgaatatacaatttatgaaaataatacaaggatattttctccaatcgttttttgcttgacgcccggatcagtgatgaaatacgcttatactaagaagaatagaaatggtgaagaagatgaattcattttatgacgtgcagcagctgtttaagtcattcggacatattgtttatttcggtgacagacaagccgaaattgactttatgaaagatgaattaaaggaaatgtacttgtcaaacgtgattgaaagagatttatggcaaaaagccgccggagttcttcagagagaatcggagcggatcagaggcagttaacacagcaggattttaataagaaaaggagattattatggaagatacatggtttgcggggattgatctgggcggaacaaccatcaagctggcctttatcaacatgtacggtgaaattcagcataaatgggaagttccgaccgataaatccggaaacacaattacggtcacgatcgccaaagcgcttgatcagaagctggaagaactgaacaagccgaaacggattgtaaaatggatcggaatgggagcgcccggacctgtggaaatgacgacgggaatggtctatgagacgacaaatatggggtggaaaaactatccgctgaaagaccatctcgaggcggaaacgggtattccggccgtcattgaaaacgatgccaatatcgcggcgctcggagaaatgtggaagggtgcaggtgacggggccaaagatgtcattttagtgacgctcggaaccggagtcggcggaggcatcatcgtcaacggagaaatcgttcacggtaaaaacggggccggcggagaaatcggtcatatttgcagtattccggaaggaggagctccgtgcaattgcggaaaatccggctgcatcgaaacgattgcgtccgcaaccggcatcgtccgcatcgcgaaagaaaagcttgcggcggtttccgactcttcgctcttacaagtgcgcgatctgacggcacgtgacgtgttcgaagcggctaaacagcaggataagaccgcgcttgaagtcgtcgattatgtcgcaaaacatttaggcctcgtgctcggaaatctggcaagcgccatgaatccgacaaaaatcgtgctcggcggaggcgtgtctaaagcgggggaaatcctgcggtcaaaagtggaagagaccttcaaaatcaccgcgttcccgcgttctgcggaagcggccgatatttcgattgcggcacttggaaatgacgccggagtcatcggcggggcgtggattgccaaaaatgaatggctcaaacatcaaaactgctgaagaaagtctgcctgcccatatcgcgggcggctttctttttttatctcccctgtcatatagtttttaaaaaagggggatgaacatggcgggaattcgtgtcaaacctgaattgaaacagcatatgaaagatattgcaaaggtgctttcaattgatgaaaaactgttgaaagccgctgataaaacggcggaaagcgatgaattattttgtcccggctttgccgtgagcgggcagtcagagggtccgccgcttgagacgctgagcgggctttcgcgatacatccggcactgtgaaagcgttctttccgctgatcaatgggtgaaggaagaaaaggtgtacggctccgaatcggtttatgaagaaattgagaaaataacggatgtctttccgtttgtcacatgccgtaaaatcggcagttccgtattgggaaagccgctttatgagctgaaaataggtgcggatacggccgaaagaaaagtccatgtaaacgcctcatttcatgccaatgaatggatcaccacctcggtcgcgcttaaatggtgtaaagaatattccgtggcattatgcgaaaataaaaccgttttcgggcagtctgtgcttgatatattcagccggacatcattgtcattcgttccgctcgtaaatcccgacggtgttgatctcgtactttacggatgtgaagatttatcagaaaaaaaagaattcctcaacgaattaaatgagcaccgcccggatttccgcgaatggaaggcgaatataaacggtgtggatttaaataaacatttcccatccaattgggatattgaacaaaggcgcaaaccgaaagccccttcataccgtgattttccaggaacggcgccgctcactgaaccggaggcgcaggcgatgcaccggctgataacggaacagccacctgaccggctgatcgcgcttcatacgcagggagaagagatttactggggatacgaaggatgtgaaccggagcaatcatcccagatgattcgggagtttgaagcgataagcggaaaccgctatcaaggcgttaaaaccattgacagccatgccggttttagggattggtttatacagcagtatggaaaagagggctataccattgagctcgggaagggaaaaaaccctttgccttttcatcagtttgctgatatttatcaagcgacggaaggtattttgtggaggtcgcttgttttttgagacatctgtgaaatttctcatttgtttacataaacaaatatgggacaatagaaaagaatggagggaaggctgatgagatacttggtttgtgttctgctgtccgcattcgttctgtgtttagcggcctgtgaaccatctcatcagcagcaagacacaggcgtttcggcaaaatcggcagaacagaaaatcgttccgctcagtaaaaaggaagcggaaaaaacggaaggatggctggataacagaacaattctgtatacagcacatcatcagctgatgaaatatgatcttttcagcggaaaatccgaacggctctatgaaacaaagggcaatattgtcaatgtaaagatcagccggaaaaaacagctgattctcgtacaggtgacaagcagcggtcagactgagcttgtgcttatgaacaagcaggggaaaagactttatcacaaagcctttaactcttatgagctggagacggcttggaatccgtatgacccgtatcaaatgatgattaccgtttttactgaaacatgggacttcacagcctatacggccgatatgaacaacggcattttaaaaaagagtcccgttcaggccccttttgtccattggacctccactgatgaattccaatatatcaagcaaggaaaaacggaggaagagggtcctttatattcttatgacttgcagacgaaaaaagaaaaaagagtgcttcatcacgtcatctgggctgattcccgcccgggcatgacgattgccgtcagaccaacggatcaatcggacggagacggcgagttctttttccaaaagccggcatccgtgacacaccgctttcctctccaaaaaaagtatgagagcttcgcgccgatggaatatgattacgatcagacacacaagcggttttacatatttaagcctgaaggccgctcttacaatctgatcagctttgacttaggagacgaacgggagcggacggtgctcaaaaacacggaaatggagccgattcagatctctccgaacggggaatacgctttatacggctttacgtatgaccgtctgatttcactgaaaacgggcatgacagaaccaatcataacaaatgaaaaaggagtttgaaccaaatggcaattgcagatgtcacaatcattccgatcggaacaaaaacaccgagcgtcagtgagtatgtagcggatgtgcaaaaaattttggagggttacaaagctgccggcaaaatcaaatttcagctcacgccgatgaacacgttgattgaaggtgagctgagcgacttattcgcagtcattcaggatattcacgaagccccgttccaaaaagggctgcacagagtggcgacaaatatccgcattgatgacagacgtgataaagaaacgacgctggagagcaaaatcaaaagtgtcagcaaacatttgcagcaataaaaaataagcctgtatccattggatacaggcttttaatgtgcagtcggatagccgctggttacaacggtcattacggtaaaccagccaaacacgcccagcgtggcggcggctaacaaaaatcccaggatatttctctgtctgacagcccgcaggactcctaatacagctaataatgcgacaaggccgaagattacaacaagtaacatcatgctcctcctttgtcattggaacctgaaaatctttccatttcattttaaccgttttcattttgtttgtcgatagcgttttcccggccgcattcattgaatcttccgcagaaaaccttcataataagggcatatacataaagaggtgatgaaagtgaaatggagacgaatgccggccgggccgattcaggcaaacgcgtattttcttgtcagtgaggatcagtcctgtcttatttttgatccgggcggggaagcggacaaaatcaacaattacataaaagaaaacaatctgaagccgctggccatcttactgacgcacgctcattttgaccatatcggcgcacttgacgaagtaagagacagatgggatgttcccgtataccttcacaaaaatgaagaaaagtggctggaggactcttccttaaacggatcaggcatattgcggggcatcgccgtaacggcacggcccgccgaacggctcatcgaaggcgacggcattttggacatcgggcctttccatttggagacattgtttacgccgggacattcaccgggaagcgtttcttattatgtgaaggacgcggatctggtgatttcaggtgatgtgctctttcagggaggcatcggccgaactgatttacacggcggaagtcaggacgtattgcttgattccattcatcaaaaactgctcacgcttcccggacatacacttgtgttaagcgggcacgggccggaaacggacatccagacagagcaggagcgaaacccgtttatcaatggtttttcactgtaaatgaaaaaagacagaccataatcggtctgtctttttctgttcagtgggttccgccgcccggtgtcataataaaaatagagtagtatgtaaatccggcgaaaaatacggttaagtaagctccgaaaatataaatatacatccgctcagtcagattcaaataagaaagaaatacgaaaaagatcgtctgtccaaaaaacaaaagagaagcgtctttcatgccccctagaaaaaacatgactgcaaatatccccgtccaaaatcctaacacccggaacatgcgattcattccttatcccctcccgagagtctatctgaagtttattataatagatcggcactcaaaatgtaaacattttcatgattatatttattgtggaatttatgtctttccctgtgttttatatcttatgccgttctctaaaaaagatccgaaaaatctttttgaaatacgtttagggaaaaaaagttcagggtacttatgttaacaaagagacggattatccgagggaggaatttttaaaaatgaaagaacttattttttattcatacccgagctgcacatcatgccgaaaaacgaaacattggttaaaagcccacaatgttgactttcaagagcgacatctattcagggagacaccgacaattgatgaattgaaacagatcttatcattaacgaccgaaggaattgatgaaatattggcgacgagaagccaaacatttaaaaacctcaacctcaacattgaagaaatgactgtaaatgaagtgctgaagcttttgactgagaagccgaaactgctgcggcgtccgattctgatcgatcgcaataagctcgttatcggatacaatccgggagaactgatgaagctgacgaagaaaaaaacggtacatcaatctgtatcataagagaaaaacgaagatccgctgatcaaatttatcagctaatcttcgttttttgcggttgcgggactgggctagctggattcgaaccaacgatcacggagtcaaagtccattgccttaccgcttggctatagcccatcggatgtaattacagtatgtgcgtccggcgccgatttatacatacaaagtaatttgaatggaggagacccgtgaaacatttgaatgaaacattatctcgaaccttaattgaagaatcaggtgaaatcacacgccagtggctgctcataccaaaatcggggcggccttcagatgatcagaaagcggaaatgcagcaccgtctgttaattgaaatcgttgccggcattttatcggaaaaagaaggcggagaagaggagctgacaaagtgggcgcttcagttcgcaagggaccgggccgtccatgaagtaccggtctatgaaagcgtcacgagctttaaagaattccggagattggtctggaaccgtatacagacatgctgcgaaacgatgtctgagaagcccggggcgaatgcggtattccattggggagagaagctgaacaaagcaattgaccatatgattgaagtatttacagaggaatattataaagtgacggttacacaattaaacgcccaaaaggaaatgattaacgaactgagcgcgccgattatgccgattgccgccggtattggaattttgccgcttgtcggcgaaattgatacctaccgggcaaaaatgattttggaatcggtgcttgaccaatgttcttcactccggctttcttatttatttttagatatatcaggtgtgccgattgtggatacgatggtcgcttatcagattttcaaagtgattgacagcacaaaacttctcggcatagaaacgacaatctcaggcatcaggccggaaatcgcgcagaccgtcgtgaagctcggcatcgatttttctcaggtgaaaacggagcagagtctggcgaaggcgctggcaaaaaacggatttatcgtaaaagaatcattaagatgataaaaagctgaatggccgggagggatttctccctcagctattcagctttgtcagcttcaatcgtcatgatatgatggctgtcgatttcttttaccgtaaatgtgtagccttcaaaatcaatggtgctcccgggcttcgcgtcaatatgctgagtaagaaaccagcccccagtgtatcgacttgatcagccgtaatctctgttccgagtaaatcattgacgtcactgatcagcaatttggcgttcaggagatagcggttcttcccaagcttttgaacggaaggtgtttcgtccgtatcaaattcgtcgcggatttcgccgacgatctcttcaatgatatcttccgccgttactaaccccgcggttccgccgtattcatcaatgagaatggccatatgggcgtgttcccgctgcattttaacgaacaattgataaatcggaatcgtctcaatcacatggatcgccggctgaatgtaagggctgagttcgtgttttgtaaacgccgctccttctgacaggaatctgaataaaacttcttttatattgatgatgccgactacatgatctttatctccttttacgacgggataccgggtatatttatttgttttgataatgtcccggagcatatgtcccgatccgctgtctaacggcaggctcaccatttcattccggggcaccataatttctttggcagtgcgcttatcaaatgtaaaaatgttatttacgtaatgcagctcactttttttgatcatgccgcttcgatagctttcggcaaggagcacccgcaattcctcttccgtataagccatttcatgttcggaagcaggcttcaagccgaacatggctgtaatcaggcgggcggaatgattgagcagccagatgaacggaaacattaacttataaaacaaaatcatcggtctggcagacaaaagtgtaatccgctcggctttttggatagcaaaacttttcggggcgagttcgccgatgacgacattcacatatgtaaccagcagaaaggcgatgatcaatgacagtacttgggcaaccgcttcgtgaactccggtctttaaaaataacggctgaagcattgctttgactgtcggttcacccagccagccgatccccaaagcggtgacggtgatgcccaattggcacgccgataaatattcatcgaggtgtgtaatgacatgcttggctgcttttgctccttttacatcttcctcaatgagctgattaatacgggagcgccttgctttaacgattgaaaactctatggcgacaaaacacgccgttaataatataaatagtacgatggcggatagtttgatgatatacaatgtaacgccttccgcgaaggaaggcttgcacctcccttttttcggaataataccactgtagaaagctgctcaaacatcgaacctggtttagcccgcctcatttacggtaataaaacaagaaagcgatactggaggatgacaagagatgaaggtacattcgggtgcggactggctgtggtaccagctcggtccgcatgaaaaaacggaagcgaaaaaaatgatccatcacaatcactggccgcaatgcgaaaagtggtttgaacatgaaaatcatataaactttctgcgctcagatacaaatgatcagaataatgaagcggttttcggatctttaatctatcatcaaggattagatgatgaaaaaaaccataccgtatttcacttttatattacgagagacttcttttttacgattaattttgatttttcgctgctgcgcggtgtaaaagaaaagcatgccacacagcagattcaaacctgtgaaaatccgattgaaggcttttttgttctgctgggagagctgatgaattcctatctgatcggactggatgaatttgaagtcaagcagcggacgctgaaatggcagattcatgatgacaacagcaaaggaatcttggaaaatgtgcataaactgcgccatgagctgttcatttggaaaggccttacactgggggctaaaaaagtggaaatggctttaaaagaagcgtttcttccgaaaaatgacaggcagaaagattacctcagagctcatcataagatggaaagagggattacatatatcaatgagtttgatcaggaactgagcaatctgctgcacgccgaggaagtcattacctcccaaagaggaaatgaaattgtgaaagccttgacgatttttacaactctctttacaccgatgacggcgcttggagctctctgggggatgaactttgataacatgccggagcttcattggaaatatgcgtatatctgttccatcgtgctcattattgtatcaaccctgctgatttatatttatttgcggcagaaaggctggacaggggacattttgagggagcatcaaaaaaaatatttgcggaaagaaaagaaacgctaagaagagcaggcatacgcctgcttttttgatggctgaaaatggccgaatggttccggatttcattcagtaaatcaatgtcagggggcttattttttatttttttgcgttttacacagtgtaaaacgcataatctctcctttgccggcttttgtgtatctgatttacaatacgtgcggaaggagggaagtcttgtgaaaaatattgaaacatacagcaggaacatcataaacgaggcctatacggcaagggcttcagatatacacattgtgccgagagaaaaggatgctttcattcattttcgcatcggccatgctcttgtgaaaaaaagagtcttaaaaaaagaggaatgcgtaaggcttatttctcatttcaagtttttatcggccatggatataggagaaagacgtaagccgcaaaacggttcattgtctctgccgcttccgacggaaaccgttcatttgagaatgtcaaccttgccgacaatgaatgatgaaagtcttgtcatcaggcttttgcctaagcggcagattccccctctggataaactgtccttatttcggggggcgggcgccgcactattgtcctttctgaagcattcacacggcctgcttctgtttaccggcccgaccggctctggaaaaacgaccactctttactcgcttgtcaactatgcaaaacggcatttcaaccggcggattgtcacgcttgaagaccccgtagaaacaagagatgaggatgtgttgcaagttcaggtgaatgaaaaagccggagtcacatattccgccggtttaaaagcgattttaagacatgatcccgatatgatcatcttaggggaaatcagagatgccgaaacggctgaaatcgcagtccgcgcggccatgacgggacacctcgttctttcaagcctgcatacaagagatgctaagggcgccatatacaggctgctggagtttggggtgaacatgacagaaattgaacaaaccgtcattgccattgccgctcagcgtctggttgatttaacatgtccgttctgcaaagaggaaaactgttccgtgtactgccggatgtacaggcagacccgccgtgcgggcatttatgaactgctctacgggaaaaacctcacccaatgctttcaggaagcaaagggagagcacgccaattttcaatatcagacgctccgcaggctgatcagaaaaggaatcgcgctcggctatgtcacaaccgacaattacgatcggtgggtgtatcatgaagcggattaaacgaacctggccgttgaaggatcaagcggcttttttgaaaaggctcggtgaaatgacggaaaaaggatacagtctgattgaagggctcagactgctgaaactccagctgcataaacgtcagcttgcagagctgacggacggaatccgcaggctgagggaaggtgatgcgttttacgaagtgcttgaggcactgtcttttcataaagaagccgtctctatctgctatttcgcggagaaacacggagaattgccgggggcgatgaaacaaagcggcgatttgttacagagaaagctcatgcagacgaatcaaatcaaaaaaatgctccggtatccgatgtttttaatttcttccgtctgtgtcatgttttatatcctgcaaagtttaattattccgcagttttctgggatttatcaatcaatgaatatgaatacatccggtgcgactgctttcatctttgcattttttcggcattttcatgaagcctgcgcactggcgctgtccgccgctttctgcttgtttttgtacgtttggttcttatgtaagaaaaaatccccgcaagataaaatgctcattgttgtgaaaatacccctcttgggaaaagcggccgttctttttaacagctactttttctctttacagctcagcagtcttctgaaatccggcctttctatctatgacagcttaacagcttttaaagaacaatcttttctgcctttttatcgtgaagaagcagagatgctcattacacgtctgaaagccggagaaaccatagaatccgctctttccgggcatccgtgttatgaaaaagatcttgcggctgcagtcagccacggacaggcaaacggcctgcttcaccgcgaactttatacgtacagccagtttatgatggagcgtcttgaacaaaacgcggcgaagtataccggcattctccagcctgtcatttacggtgttgtggccggtatgattttaattgtctacatgtcaatgctgatgccgatgtaccagatgatgaaccaaatgtaagggagtgcttcgtctgaaaaatcaagatgggtttactttaattgaaatgctgatcgttttatttatcgtttccattctgcttttaatcaccattcctaacgttacaaaacataatcaaagcattcagcataaaggctgtgaaggactgcagaatatggtgaaagcccaagtgacggcgtacgaaatcgaccatgaaggtaaaatgccggatatgaacgatttacaatcagaggggtatatcaaaaagaatacagcctgcccgaatggtaaacagatcttaattagtggcggagaagttacagttgaacaataacaggcggacagaaaacgggtttacccttcttgaaagcctgattgtgttaagcctggcgtccgtcctgctgacggttttgttcacgacggttccgccggtctgcacccaccttgccgtgcggcaaaaaacagaacagcttcaaaaagatattcagcttgcgcaggaaacggctatcgcagaacataaaagaacaaaaatcacttttcttccaagagagcataaatacaaactgcagtcagccggaaggattgtcgagcgttcttttgattcgcttcacattacacttgtgactttaccggagagccttgaatttaacgaaaaaggccatccgaattcgggaggaaagattcgattgaagagcgccgggttcacctatgagatcacagtttacttagggagcggaaatgtccatgctaaacggaaataaagggttctctactattgaaacactatcagcaatggccatttggctgttccttatgacgtctatcattccggtctggacaggcatgctgacagatggtctgaaaatagaagatcgccaggaagcgtatcagcttcttcagaaacatatcagcacttatatgatgaccggaaaaaagccgccgtctcccggtgtgaagtggaagggggatggtgagtattacaaagtgtgtgcggctgaccgcggcgaaaaagaaatgtgcctcagcattctcaaaacagactggctttacgcttcttaatgttttgttctccttggcagtctgtcttttcctatcaggcaccctgggcccgattttacatctgtttttatcaaaccggaccgataacggcggattagacagccgggagcatcaaattgccgttcagcagatcatgaacgaatgtaaacaggctgagactgtgaagccggcggacggcggattggcgttagcatgccggaaaacagggggcgaagaagtgcgttttgaaatttatcataagatgataaggaaaagagtaaacggaaaaggccacgtgccgatcctgcaaaacgcggcatcattaacggctgatgtgaaaaacggcctgctcttattagagatctcaagcgttacaggtaaaaagaatcaggcggtcattccggtttacagctctttaaaaggtgattaaatgtacaaatctgacggttttatctatcccgcggttctgtttgtttctgccgcagttttacttgtcatcagctatacttcatctgatttcatcacccgaaaaacatttgcgaaagaggccggggagtactggatcggagagaatctgctccaaaacggcgcgctgctgtcaagccgccatatgacacagggacaaaaggtccaaactggtacacagcgttttccgtacggaactgtttccttccgcatcaccgggagtaatcgccgggaaacggttcaggttacaattcaggccgaaacagtgtcaggcacgagacgggaggctcaccttttgttcgatcagaagaagaaacagctgattcaatggacggaagtataaaaaagaggcggcgggacaacacttcatagtaaagacagcactatgaggtgagagccgtgaaaacaaatgattatgtaaaatatatgactgagcaattcgttaaatatttcgatacgccgaaacaggaacggagagagcgaaaagaagtgcggaaagaaaagaaagtgccggcttctcagcactggttcggaatattgccgtacagttttaagctgtggatgcagcggaaaaaataaagcgaatcacacataaggtcctcctgtatcaggagggccttattggtattcctcaatgacggcaattttatttaccttttggctgtagggattaaaagaaatcgtaacaaacacaccaaattcttttgcgccatcccgcaatgtcaagtggtattgtttgactgcttcgtccgttcttttccggtcccacaccttttgaataaataacgtttgggcgagcggatatctttttttagcttctttttctgctaacttttcccattttgatttatggtgaacagcataataaggcaccgtttccgcctgagctgttcctgaaaccccgaaaacaagaagagaaaggcaaatcagactttgtgtgatcatcattcttcgtcctttcgctgtatatactttccattttgtgctaggcacctcgttattttctcacgttttattagaaaaaattccaaaaaggtgtgtaatttgaagcaaaacgatgtttttgaaagataccattctcaaaaacgaacaaattgaccgattttgacatttttcaagacgataatccttgattatactttgttcatgaagttctttaaagagaacggttgtcatatttattaacagttttacagggggtaaggcatgttccgattgttgcgaatggaaaaaaagggcaaggtgagatggcggatgatgctatttttacggctttcgttcattttttgcctgtccgtgacgatatgtgctcagttcacaggtgatacaagttcctccttcaatgatgtgaaaagcttcagtctcccggttcaaacgtgcggagattttcaatatacggatgacgattgccgttatgacgaacgctgggatcagagtgatttacatataacaaatcaaactgatacgtcaggcaccgtgtgtgcgccgcttcaactctatgccgagctggagaataagggaaaagagcggactgtttctgactggaaatgggagctccataaaatcacttctcagcagcagcctttacgaaacggcaatgttgtggataaagggcttattactgataaaaaaagcaaaacgatttataaaattgagtcaaagcggtctttgcagccgggcatatacgcattcaagatttacaagcctgaagggtatccggcggacgaagaacaatttgagtggtcaaaaccgatgaaactcgtcaaatgccgggaacaggcaaccgtttccgatctgaagaaaacggagaaagagccggctgagccggtaaaagaaagcggggaagaacatgaaaaaaacgctgaaactgatcagtaatattttgtatgccgtcatcttcagcctgattattgtgctgacgttaacggtgatttcgacccgggcttccgggggtgagccggccatcttcggctatacgctgaaatccgtgctgtcgggttcaatggacccggaatttaagacgggttcgctcatagcggtaaagaaaatttctgacgtaaatgacttaaaaaaaggggatgtgatcacctttacgcaagatgacggaacagccgtcacacacagaataatcgggatcacaaaaaaggacgggaacctgctgtttgagacaaaaggggaccataatgccgccccggatgccgcccccgttcaagctgaaaaagtggcggcccagtatacgggatatcagcttccgtatgcgggatatgtcatacatttggcaagccagccgatcggaacggcgattctgttaatcgttcccggcgtcatgcttttgatttactcaataacagtcatcgtcagcgccctccgcgatattgagcggaaaacgaaagcgctggaagaacatgcgaaaaagagaaccatctccacatgaatacggttgcaacctggcgacaggatttgataacaaaaaataaaaagtaaggggagtacaaacatgggtatgaaaaagaaattaagcttgggcgttgcctctgccgcactcggtttagcattagtaggaggaggcacatgggccgcatttaatgatgtgaagtcgacggacgctacatttgcgtcaggaacacttgatttatcggctaaagaacaatcagccaatgtcaatttgtcaaacttaaaaccaggtgataaattgacgaaagattttgaattcagaaacaacggttcacttgccattaaagaagtgctgatggctttgaattttactgactttaaaggagcaaagaaaggcaatgaatctgcggaggatttcctcagccagtttgaaattacggttctgacagtcggtaaagaagggggcaacggctatcctaaaaatatcattttaaaggcggccagcctgaaagacttatacttaatgtcaacaaagcaggataaagcagctgccgaagcgatcagcaagcacattgatccgaaattcctgagcgagagcggaaaagtcaatgtggcaaccattaacggcaaaacagctcctgagtacgacggagttccgaaaacgcctgctgattatgaccaggtgagaatggaaatccaatttaaaaatgacaccgcaaaaactgcggacggattaagtgtgcaaaacaagttccaaggcaatgcgatttctcttcaattctcttttgaagccacgcaatggaacggcttgaccattaagaaagatcatacggataaagacggttacgtcaaagaaaatgaaaaggctcacagtgaggataaaaactaatccgaaagtcggacagttaaaagaggagttgtgcacatatggcggcactactcctctttttgcgcttttctccatttttgataatctaaaaattcacgaaattgtttttttgataccccggatgtcatcgcatcgcgaactaatttctcccattcactatctaattgaccatcgtattcggtttcatgtttttcatcaagtaaagtatgaaccgagacgtccagaacagcggagactttttcgagaaattgaatggaggggttcgtctgtaaatttcgttctattgagcttaaataagacttcgctaccccagctttttcagctagttctgatagtgagtagcctttttcttttcggtattgtttaatacgctggccaatcaatgtcatcaccttccttgtgatattatagcacattcagaaaggatttacggtatgacttctggctgcctggatatgttgagaagactttttatgcgaaagcaggtatttgcgtatttcttctaggctgatatttgctttttgggcttctaatatcagctcaacccattccttatctaattgcgaaaattccatttttgcatttttcatgcattttctcctcctaaaatacttgtttatgtatttcagccaatccgcccatgaccttatctttacatgtctggaagtgattcatcgcatgcgaaacgccagaaattttttctatatacttttattataatatagaatttccagaaaaaacgggaaaggtgtcgaatggataacgcttatccagaaaaattactttgcaggaaaaataaaccgccgttttcaatctgaatgtgaattttcggctgatataaggctttcagcgcttgtttttccaaatggtattcctcaggtttttcttctgtctgctcataaaactgatcgagcagcctgaggtcctttttccatctggcgatcgcgctgtcagcccagtctgacggctctttggcggcagcgtcttttaagtaatgctccatccttttaatcccgctttccggcttaatcatcggcgatatggtaaagcaatagtctgatatttgcgaggtcagcggaagcggtgcaagcttctgctgaaacccttctataattgttccagaaacaagatgcaggcctaaagacaaaagtctgtcttttttcatgtcggattggtatgaaatcactacatttaatccaagccagggctgaagcggcactctggctccggctgatacaattttctcatatattcttgtaaatctcccattttgtttaactgcttgaaagatttgaaagaggcgcggggctccaaagtaaataaactcgccgtccatatcctccggagccgtttctttatcagtgatgaacgtaatcttcatcgggttcggttcgccgcccgttttttcacgccaatgccaataaaacgggcggttcataatttgtttgtccatctcgaccgtcaactgaaccgtcataaaacccggcccgtgttctgtaatcgggcagtggttcgcttcaaaaaagcgcagtaaaaattggtgaacctcctgctgtctcatgtcgcgcttcctcctttttaagagcctttttttctggcgggcttttccgtaccgtacgacagaaaagaggtgagattgtccattttgattctcatttcctcctctgtcagcgaatggcataaaatatcatgcaaatggtcttcaaaattgctcactttgatttttgttaaaatgtcatctaattctccgacgacattttcaaataaatgaattttgtcatacagaagttttaagatatgctcttccaccgtatgttttgtcgccatattgtagatatggacatctctttcctgaccgagtctgtgaatccttccgattctttgttcaagccgcatcgggttccacgggaggtcataattgataatatggttgcagaattgcaggttgatcccttcgcctccggcttctgtagcgatcagcacctgcactttgccgcggaaaagatccttcatccagtctttttttccgcgtttaaatccgcctctgaacggaacggagcttatgccgttctgctgaaggaaccattgcaggtaaatctgtgtcgccctgtattcagtaaaaataatgactttatcattaatcttttggatcaagtcaacaacttgaatcgcttttgagttttgcgtgacttgattgatgcggtccattaaattagcgatcgtctgttcatcgaatgcgggcgcttgtttgtctttttggtcaagcatttttttgagcgtcatatacacggcttccctgcttgaacagcactctctttgcagcgtcataatggaaaatgcgcttgcgggcttttccgtgccgtttttcagtgcggcaatgtcatcgtaaagcgcctgttccgtcggtgaaaaggtgatcggcactgtttccacgtggcgcttcgtccatgtaaggccggtgtcgctccgcgtgttgcggatcatcaccttattgacgagttctttcaaatgctcatgagcgtcaatcccgtccttctgattgaaggtttcttgaaatccgctttcatttcctaaatggccgggctttaacagtgacactaaattgaagatttcttcgatccggttttgaatcggcgtcgccgtcagaagcaggcagtatttcttcacaagacttctcgcaaattcataatttttcgttttgctgtttttgagcttgtgcgcctcgtcaataatgacgagatcatacggaatagaaaggacaatgtctttgtgaggggagcgtttggccgtatcaatagaagaaacgacgatatcgcactgttcccacacatagcttttcttctgttcaacagcgggtattaaaaacttctcctgaagctctttcacccactgggaaacgagtgatgccggcacaagaatcaggatttttttggccagcccgcgaatcatatattcttttaaaatcaggcccgcttccaccgtttttccgagccccacttcatcagccaaaatcgccttgccgttcattttttcaacgactttctgcgcgacctcaagctgatggggaagcggagtgaaatcgggcaggtataaaggagctctcaacccttcaaattcaggaatggcaagggtctgctggacttcagccgacagtttgtacagctcccaatttgaccagggaccgtccgttttcagccgctcagaaaactctcccggccagtttgcatcaaatatgatctctgctgtcatatgtaacaaaaccgcctttcttttaaaaaactgatttatcataatttttgttgccggacgtaaatgagggtggtaggatataagtaatgatttcactaaaagatattgctttagtatgtccataaaattggtaaatatgagcgaatgacagcaaggggagagactcggacgaaagatgggcgtccgggcgccgaaggagcaaactgcggagtgaatctctcaggcaaaagaactcttgctcgacgcaactctggagagtgtctgcacttagaagaagcaggccaccaaaggggacgtctttatgatatgttcataaagtaaactttcaggtgccgggacagagaaaccttcattttcatgaggtgtttctctgtccttttttatatgtttttacaagcgccaatgactgaagggggaagatgatgctgaaacgaacaccgctttatgatgtgtataaagaatacggcggaaaaacgattgattttggaggatgggagctgccggttcaattttcttctattaaagaggagcatgaagccgtccgcacaaaagcgggcctgtttgatgtgtctcatatgggggaagttgaagtatccggtaaagacgccctgtcttttctgcaaaaaatgatgacaaatgacgttgccgatttaaagccgggaaacgcgctttataccgccatgtgctatcctgacggcggtacggtcgatgatttgctgatctatcagaaaagcgagagctgctatctgctcgtgataaacgcgtctaatattgaaaaagacatcgcctggctgacagaacatgcggaaggagatgtcacgctgacgaatcagtctgacgggatttcactgcttgccgttcaggggccgaatgctcagtcggttcttgcgaagctgactgaatgtgatctgtcctccttaaagccgtttgcatttattgacgaggcggacgttgccggacgccaagtcctgctttcaagaacaggctataccggtgaagacgggtttgagttatattgccgcaatgaagatgcggttcatctatttaaggagatacttgcagcgggagagcatgaaggcctcgttccgtgcggcctcggcgcccgtgatacgctgagatttgaagcgaagcttgctttatacggtcaggaattgacgaaagatattacaccgattgaagccggaatcggatttgccgtgaaacacaagaaagattccgattttttcgggaaatctgtattgcgtgaacagaaagaaaaaggagccccgcgaaagctggtcggacttgagatgattgaaaaagggattccgagacacgggtacgccgtgaaaaaagacggtgttccgatcggggaagtcacgacaggcacgcaatctccgactttaaagaaaaatatcggccttgccttaatcaaaacggaattcagtgaagtcggaacggaagtagaagtggaaatccgtaaaaaaacggtaaaagcgaagatagtccgcacaccgttttataaacgtccaaaacagagctgaaaaaggagagtcatatgaagcatcgatatttgcccgcgacagaacaggataaaaaagaaatgctgaaagccatcggcgcagaaacaattgatgaactgtttgccgatattccggaagatgtgaggtttcaaaaagactaccaaattaaaaaagcaaaatctgaaacggagctgacgagagagctgacaaagcttgcggcgaaaaataaggacgctgttacatatgcgtcttttctgggcgcaggagtgtacgatcactaccagccggtcatcgtcgatcatgtgatatcccgatcagagttttacacggcatatacgccttatcagcctgaaatttcacaaggggagctgcaggcgatttttgaatttcaaacgatgatctgtgaattaacgggaatggatatcgcaaactcctctatgtacgacgggggaacggcgcttgcggaagcggcgatgcttgcgtcgggacatacgaaaaagaaaaaaatcattatttccgcagccgttcatccggaatcacgggatgttttgaaaacatacgcaaagggccaatatattgaggttgtagaggtgcccgcgaaaaacggcgtcacagatcttgaagcattggaacatgccgtttgtgatgagacggccgccgtgatcgttcagtatccgaacttcttcggacaaatcgagccgttaaaggacattgagccgctcgcacataaaggaaacagccagctgattgtttcttcaaacccgctcgcgctcggtattttgacaccgcccggggcatacggagctgatattgtcgtcggagacgcgcagcctttcggcatacctgcggcgttcggcggcccgcactgcggctattttgcagtaacgaaaaaactgatgagaaaggtgccgggccggcttgtcggccaaacagaggatgaaaacgggcgaagaggttttgttctcacccttcaggcgcgcgagcagcatatcagaagagacaaagccacgtctaacatttgttcaaatcaggcgctgaatgctttagcggcttcagtcgcgatgacggcgctcggaaaaaacggcgtcaaagacatggcccgccaaaatatattgaaagctgattacgcgagacgccaagcggaaaaagccggcttgcacgtagcatttgacggcccgatatttaatgaatttgccgtcaggctgaatcttcccgtcaaggaagcaaaccggcggctcctgcaagacggcatcatcggcggatatgacttaggtcttgcgtatccggaactggatcagcatatgctgattgccgtcacagagctgagaacgaaagaagagatcgattcgcttattgcgggattgggggatcaacatgaataatcaagatcaggcgcttatttttgaaatgtcccgcgaagggcgtgtcggttacagccttccggagcttgatgtgccggaaacagagcttgaaagccttcttcccggtgactatatccgcgatgaagacgcaaagctgccggaagtatcagagcttgatattatgcggcattataccgctctttctaagagaaaccacggagttgattcaggcttttatccgctcggctcctgtacgatgaaatacaatccgaaattaaatgaaaaaattgcccggttcgcaggtttctccgctattcatccgcttcaggacgaggacacggttcagggggcgcttgagcttttatacgatttaagcggacacttggaggagattacgggcatggacgaggtgacgctacagcctgcggcgggcgctcacggcgaatggaccggcctgatgatgatccgcgcctaccacgaagcgcggggagacttcggacggacgaaggtgattgtccctgattcagcccacggtacgaatccggcatccgccacggtcgccggttttgaaacgattaccgttaagtcaaatgagcacgggctggttgacattgaagatttgaaaagagcggtaaacgaagaaacagcggcgctgatgctgacgaatccgaacaccctcgggttatttgaagaaaacattacggaaatggctgaaatcgtccatcaggccggcggaaagctttattatgacggagcgaatttaaatgccgttttaagtaaagcaagaccgggagatatgggatttgacgtcgttcaccttaatctgcataaaacatttaccgggccgcacggcgggggaggaccgggctcagggccagtcggagtgaaaaaagaattcattccgtatctgccgaaacccgttctcacgaaaaaagagggccgtttgacttttgactatgaccggccgcagtcgatcgggcgcgtaaaaccttattacggcaacttcggcattaatgtcagagcctacacgtatatccgttccatggggcctgacggcttaaaagctgtgaccgaaaacgcggttttaaatgcaaattatatgatgagaagactcgcgccttattatgatctcccgtttgaccgtcattgcaagcatgaatttgtgttatcgggaagaaggcagaaaaagctcggcgtaagaacgcttgatattgccaaacggcttttggatttcggctatcatccgccgactgtgtattttcctctcaatgttgaagaaagcatcatgatcgaaccgacggaaacggaatcgaaggaaacgcttgatgcgtttatagatgccatgattcaaattgcgcgggaagcggaggaatcgcctgaaatcgttcaggaggcgccgcatacaacagttgtcaaaagaatggatgaaaccaaggcggctagaaagccggttttaaaatacgaacgtacacctgacgtcagccgctgacacggtataaaaaaagagcttccgtataaaacggacagctcttttttcatgattagttttttgctttaatttttccgccccattttttaaatccgcctttcaggttgtaaatatctttgcagccgtgtttgcggagcgtctgtgccgcgcgtccgctgcggacattgttttggcagtacagataaacgggtttatcaggacggatttcacttttgcgctgtttcagctgtgacagcggaatgttgcgcgcgccgagaatatgaccgccttcaaattcattcggttcacggacgtcaatcagctgcgcttttctgtagcccgcgcggaattcctcttccgtaagtgttttcattaaacgctgctggtaaaagtacgaaacgatcatataaacgataaacgccgcaacaataattaaagcaatcatattagacaatgcaattctactcctttagcttataaaatcaaaaccctgcttcctgaaaacaaggcttaccggacgttttgggacaaatactattatagtaaagcatgaagcgattgtcatccttaatgaaacgaaatatttttcattttcaaggcagtttgttaaactggttttattaaaacgataaagaagggttcagtgtatggaaaaagaaacatggcggtttattgactcagggaatgaaagcccggcatttaacatggcgctggatgaagcgcttttatattggcacagccaaaaaaaaattcctccggtgatccgtttttacggctggaatccggcaactttgtctgtcgggtattttcaaaatattaagaaggaaattaactttgacgcagtacataaacacggcctcgggtttgtcagaagaccgacaggcggacggggtgttctgcatgataaagaattgacatacagcgtaatcgtttcagaggatcacccggaaatgccggccacggtgacagaggcgtaccgggtgatttcagaaggtattctgcagggattcagaaaccttggacttgatgcctgctttgcgattccgcgaacggagaaagaaaaagaaagcttgaaaaatccgcgctcgtccgtctgctttgatgccccttcgtggtatgagctggtcgtcgaaggacggaaagttgccggaagcgcacagacacgccaaaaaggcgtcattcttcagcacggttccatcctgcttgacattgatgaggataagctgtttgatctgtttttatatccgagcgacagagtccgtgagcgcatgcagcggaatttcaaaaacaaagcggtagccatcaacgccttaacgccgaaacgggtaacgatggatgaggccagaatcgcttttaaagccggttttgaggaagggctgaacattcatcttgagccttacacactcacgtctgaagagcttgcatttgtcaatgagctggctgagacgaaatacgcgtctgatgaatggaattataagcgctgataaggcttgacagaccggaagcatccttgttttttcatgaccgttagtgtaaacttgtaatggtttataaagttaaggtgctttttgggagggttacttatgacaacaccaagtatggaagattatattgaacagatttatatgctgatagaagaaaaaggatatgcacgggtttctgatatcgcggaagctttggcagtccaccctcctctgtaacgaaaatggttcaaaaactagataaagacgagtatttgatttatgaaaaatatcgcgggctcgtattgacgtcaaaaggcaaaaagatcggcaaacggctcgtatacagacacgaattgcttgagcagtttttaagaatcattggtgttgatgaagagaagatttacaatgatgttgaaggaatcgaacatcatctgagctggaacagcattgaccgcatcggcgacctcgttcagtattttgaagatgacgaaagccggaaaaaagaattgaaatccgtacagaaaaaaaccgaaaatcccggtgaataaagggcagcccgaaatggggcgccctttttttaatgtcttcattctttggtctatttcgcccagccgtttcttaaaataataatacaccttgagatggaagggagagggcgcgctatgcagattgacggcgtattttcgggcggggggataaaaggggtggcgcttgccggcgcttatgaagcgctggaagaaaagggctttcgctttgaaaggctcgccggaacaagcgccggcgcgattattgccgcatttatcgctgcgggctatacgagcagagaggttcattccatcatagatgaggtggacggaaggcaattgcttgatcagagatactcattcctcccgctgaaaatcctgcagtgggtgtcgatatattggcgcctcggactatacagaggcgatatgctggaaaagtggattgcggataaattaaaagcgaagggcatcatcgcgttcggcgatttgaaaaaaggctcgctccgtctcatcgcttcagatctgacgaacggaacgatgatcgtgcttcctgacgatcttccccgctacggattaaatccggagatgttcccggttgccagagccgtcagaatgagctgcagcattccttatttttttgaaccgataaaactgaagaccgaaaaaggcacctcaacggtcgttgacggcggcgtgttaagcaatttcccgatttggctgtattcaaaagaacgcaaacggccggtcatcggaatttcgctttcgcccaacgaaaaagagcgcccgaaaaaatcaatccgcaacgcttttgagctgttcggggctttgtttgaaacgatgaaagacgctcatgatgccaggcatatcgcgacaaagtacgaacagaatattatttttattccggtggaacatgtgatggcgacggagtttcatctcacaccgcaaaaaaaactagctctcattgagctaggaaaaagcagaacagagcaatttttgaagcaatggagctattaaaaaagcgctctgtttttctttttattctttttgccttctatgacggtaagctgggtctggctttttttcttaagaatcatcggcttcggtctgctgctgctcggcacgctccgcaaatggctgacccggcctctgtgtccggcgcggtgcttcgctttttgctccttcattcggagccgcgattgtctggccgcttttttgaaagcggttccgtcacggccggtgcgtcggttcaggaccgtcctcacgataaaataaataataatgcctgcgataataacggtgattgctcttgaaatcatctgcccggggttggttaccgccgcataaatgaaaccgaatgcgccaagcgctatcaatacagcaaaaaaaggttgtacacgatgattcataactgcccacctccaaaataataacggtaacggttcagattacgttgtgagacggattttcgctctgttctgaaatgtcttccagtctgagaagctcgttaaagctttctatggcaacctcgacctggtcatccgccggttcctttgtcgttaaaagctgcagccacaggccgggataaccgagcactttcaaaacggggatattccgtactctgttcgtcagctggagcacttcaaaggagatgccgagaacgaccggtataagcgcaatcctgtctaaaatccgcacccaaagcggatctgtcggaacgagtaaatagacgaacatgccgacaatgatcgtaaataaaataaagcttgaaccgcaacggtaatgaagccgtgactgtttctgaacattttctattgtaattggcaaattctgttcataacagtttatgaccttatgttcggctccatgatattgaaacactcttttaattaacggcgtcattgataaaaaataaatgtagccgagaagcagaatcagcttaaacagactttcgattccgatctgcgcggcgtctgaggaaaatacgggccttacaagctccgctaagaagaccgggacgagcgtaaaaacgaatttgctgaacaaaaacgacagaacgccgatcaccgccaggctgaaaaacatcgataagccggaacccttcttctcttcctgctccagcttggcgtcatcctgaggatcaagcccgtaacgttcgctggaaaagtttaaatgctttgtgccgttggcgctcgcctcaatgatggcgacaattccccgcaaaaaaggaatcttttttaaagccgaaagcttggcgttcggcactctcggaagcttgaaaaaatcaatgcttccgtcattcctgcggatggcggtaacataattttttctgccgccgaacattaccccttcaacgacagcctgcccgccgtatgcagggggcgttttttgtttggacattgtttatcaacctgcctgttttcttaggatttactaaccatttcctttcactctattgtacaggaaaccgcggtaaacctctagttagacagccggaaaatcaatgctttttctacatgcagtataccccgtttctttagattttactcattgaatgaaaatatggcgcagctttttatgacttttcaatttttgggcagtctatgactggaggtgccatgatgacaagcgaaaaacattcagaacaggaagaaaaaaagaagcaggatgatgatcagcagcctgtttcatttaccggcagaatttgcggtatcggatttgccggcggtgtattttggagtttgatcggctatctcgggtatgtctttcatttttcagagatcagccccaacatgattcttcagccgtttatgatcggagaatggaaaaaacaatggctgggcacgatggtcagcatcgttgtcatcggattcatttcaattgccggggcgtttatttatttcgtctgcctgaagcgttttaaaaccatgtggccggggatggtgtacggcgtcattttatggtgtgcggtttttttcttattcaatccgattttcgaagatgtgaaatccgtcactgaattgaaatcagatacaatcgtgacgacgctttgcctttacattctgtacggtttgtttgtcggctactcaatttccttcaactacaatgaacttacgtcagacaagcttgcaagggcgctcggcaacaagtgaataagtgtataatccctgtccggtatggtaaaatgttcacgagaagtgaacattttttatgctgaaaaccgggcagggatgctcccgcgttgtcaggcggcagtcaagaatcggcgaggaggagaaagggaatgaaacttgagaaattgcgaaatcttttcggtcagctggatatagacggaatgttggtgacaagctccgccaatctgcagtacatgacgggatttacgggttcgtcaggccttgcggtcatatcgaaagaacgtgcggcatttatcacggatttccgttacaccgagcaggcgaagacgcaagtgaagggttttgacattatcgagcacggcggaagcttaatccaaacggctgcggatacgattcttgagtacggcattaaaaaactcggcttcgagcaaaacagcatgacgtacggaacatatgcatcctaccaagcggtgctgcaggaagcggagatggttcccgtcgcggattccgttgaaaagttgcgcttgattaagtcaagtgaagagattaagatattagaggaagctgcgaagattgcggatgatgcgtttgaacatattctgacgtttatcaaaccgggcatctcagagatttcagttgcaaacgagcttgaattttatatgagacgtcaaggagcagacggctcttcctttgatatgatcgtcgcctcgggagtcagatccagccttccccacggagtggcaagcggcaaattgattgaaaagggagacttggtcacgctcgatttcggcgcttattataaaggctattgttctgatatcacacgcaccgtcgcggtcggagagccaagtgataaactgaaagagatttatcaggtcgtatacgatgcccaagcgcttggtgtcctgcatattaaacccggcatgacgggaaaagaagcggatgccctgacgagggatcatatcaccgcaaaaggctacggacagtatttcggccattcgacaggacacgggttcggaatggaagtccatgaatcaccggggctgtctttcaggtcatcggccgttcttgagccgggcatggcggtaacggttgagccgggcatatacataccggaagtcgggggcgcaagaatcgaagatgatatcatcatcactgaggacggcaaccggacaattacgcattcccctaaagaattaattattttgtgatcggagtataggaggacatcaaacatgatttcagttaacgattttcgtacaggactaacgattgaagtagacggcggcatttggcgcgtcgttgactttcagcacgtaaaaccgggaaaaggagcggcatttgtccgttctaaattgcgtaacctgcgcacgggcgctattcaggagaaaacattccgtgcaggtgaaaaagtcgcgaaagctcaaatcgaaacaaaaacgatgcagtatctttatgccaacggcgatcagcacgtgttcatggatacaagctcatatgaacagcttgaattgaacgaaaaccaaatcgaagaagaattgaaataccttctggaaaatatgtctgtgcatatcatgatgtatcagtctgaaacgctcggtattgaactgccgaacacagttgaactgaaagttgttgaaacagagccgggaattaaaggcgacacggcgtcaggcggcacgaaacctgccaaaacggaaacaggccttgtcgtaaacgtaccgttcttcgtgaacgaaggcgatacgctggttgtaaatacatcagacggttcttacgtgtcaagagcgtagttaaagaaattcggagtctgctccttttacggggcaggcttttttttgcgttctgcctcagaatctttcttctatatgaaaatagtgagactacttccgtgagctagagcatatagtgtaacaaaatgcttgaagttgggggattgcaatgaaatttttgttcggttcaatcaattctactgttttaacgatggccggtttacgagttttgtcctcgctcattgaattatctgccgctattatcatgcttttgacaaacgacatcagaaaagcggttgtggtgaatagtattttggcaatcgtcggccctctgatctttatcatcacaatgacgatcggcatttatcagattgccggacagctctcatatgcaaaattaatattgatttttgcgggtgtggtgctgattttggccggtgtgcataaatagagggccggggtgtcataaagtctgtcccggatcatacattttaaagaagccaatcggtaaaaaggaggggactctattgaatgaaattacagaggttctccctgaattattgagagatgccatctccgccgtgcccgaagaagcgaggcgggatacagaagaaatcagaatccgggtcgacaggccggttgaactgatccaaaaaggacaacctttgtatttgtcatatgtgtgtacggccggcgacgcacagctgatcctcagccggctcagcaactatagtatgtacacgctggaagaagagctgaaaaaaggatacatcacaatcagaggaggccaccgtgtggggctggccggaagagtcatcgtcgaaaacggagccgtcaaaggactccgggatattacttcttttaatatccgaatcgcccgggagaagctggggatcgcagaaccgctcattcctttcttatggaaagaaaactggctgaacacgctgatcatcggtcctccgcaaacggggaaaacgaccttgcttcgtgatttggcccggctttccagcaccggatcaaaacgcattccggcaaaaaagacaggtatcgtagatgaacggtcggaaattgccggctgcctgcggggcattccccagcacagtttcggccgcagagtcgatgtccttgatgcctgtccgaaggcggaagggctgatgatgatgatccgttctatgagtcctgatgtcataattgtggatgaaatcgggagaatggaagactcacaagcgctgctggaggcgctccatgcgggcgtatccgttatcgtctctgcgcacggatggaatatgaaagacttggtcaagaggccgtcgctgaaaatgctttgggaggaaaacgtgtttgaccggtatgttgaactgtcaagacgccgcggtccgggaacgatcagcaggatgtacggaaaggacgggaaacctgttccgcatgctgaaagcgtgatgacatgctgaagcttttgggtgccgtgttcattctgacagcgacgacatggacgggatttgagatcgccaaaatgtatattgaaaggccgagacagatccgtcagctgcgcgcggcgctgcaatcgcttgaagcggaaatcatgttcgggcatacgccgctgcacatagcttcgggacaaatcgccgcacagctttccaagcctgtatcgtcattgtttcaagctttcagcaggaggcttgagcagggaagcgattccgccaaaacggcctgggaacagagcttgaaacataactggccctccatggcgatgaaaaaaagcgaatacgatgtgctgaagcaattcggagagacgctcgggctccatgaccgtgtttctcagcagaaacatatcaagcttgcgcttacacatttggaagcggcggaagcggatgccggacgggcgcaggcgaaaaatgaaaaaatggtgaaaagcttaggatttttagccggactgttactcattcttctattgatgtaaacatgaggggagcaaacataaaatgggagtcgacgtaaatgtcatttttcaaatcgccggagtcggtatcgtggttgcgtttctgcacaccatacttgaccaaatgggaaaaaaagaatacgcccaatgggtgacgctgcttggctttatctatattttatttatggtggcgacgattgtcgatgacctgttcaaaaagatcaaagctgtgtttctattccaaggatagggggcttacagattgagattgttcaaattgtaggtttaggcctgatcgccacatttctctccctgatcgtaaaagaacagaaaccgactttcgcgtttatgattgtcgtcttcagcggctgcgtgatctttctctatctcatcgatcagatttacgacattatcagaatgatagaaaaaatagccgtcaatgcaaatgtcaatatggtctatgtggaaaccattttaaaaattatcggcatcgcctacatcgctgaattcggtgcgcagctgacaaaggatgcgggccagggagcgattgcttcgaaaatagagctggccggaaaaattttgatactggtaatggccgtgccgatactcaccgtcattattgaaacgattctcggacttattccttcttgatcatcaataaaatggaaaggggggcacaaaaaatgaagcgctttcggtgggcgggggcttttttgttcatcctcttattttttcagactgaatgtgtacaagctgccggaacagacggtgcgtcgcaggaaaccgcagttcaccaagaatccgctgatgaagtggcgaaaaagcaggccgaagcgctgaaaacagaaggcatcggaaagttttgggacgacatcatgacagaatacggcggtcttctgcctgaaagccaaaagggaagcatcatcgactttattaacggtgaaaaaacgttctcgccggaggcatggctgaaggctttattttcatacttgtttcatgaagtgctcgcaaacggaaagcttctgggaactttgattcttctcaccattttttgtgtcattctgcagcttttgcaaaatgcgtttcagcagagcactgtcagcaaagtggcttatgcaatcgtctacatggtgctgattattctcgctttaaacagctttcatgttgccgtcaattatgccagtgaagcgatccagacgatgacaagtttcattctcgcgctcatcccgcttttactcgcgcttttggcgtcttccgggggagccgtctccgcagctttttttcaccccgttattttatttctgatgaatacgagcggccttctcattcaaaacattgtcatgccgcttattttcctgtcagcgattttaagcatcgtcagcacgatgacggatcaatataaagtcacgcagcttgccaatctgctcagaaatatcgcgatcggcgcgcttgccgtatttctcaccgtgtttctcggcgtcatctccgtacagggggcttcggctgccgtgacggacgggattacgctcaggactgcaaaatttatcacaggcaattttattcccgtgctcggccggatgtttacggatgcgacggatacggtcatcagcgcatcgctcctattaaaaaacaccgtgggaatcctaggagtcggaattttgatctgcatctccgcgtttccggcgatcaaagtgctctcgctcgcttttatttataagctcgcggccgctattctgcagccgctcggaggcgggcccgtcattacgtgcctcggcgtcatcagccgaagcgtgctgtatattttcgcggcgctcgccatcgtctctctcatgtttttcctcagtattacagtcattattacagcaggcaacctcaccatgatgatgaaataaaggaggcccattggatatgagctttttaacagaatggctgacaagcattattttgtttatcttattcgccatcgtcatcgacatgctgctgcccagctccagtatgcaaaaatacgccaagatggttgtcagcctgctgttaatcattgtcatgctcaacccgatcttcaaacttttcaaaacagacccggaaatcatcttcgattatttgacaaaacaagagcaatctcaatccgctgatataaaaaatcaaatcaaatcagaaaaaaaagaaatacaagcatcaaaccgcgcatatgttttagaagaaatggctgtccaactaaaaaagaaagcggaggagatgttcagtcatgacgaatacaaaatagacgacatccgccttacagcggaagaacaggttcgttcagaagaagatgtaaaaacgatcagcgtgtatatggccccatcttctgaaaaaaccgtgcaaaccgtcgcaccgatcgacatccgcacagaccgcaaatacgaaccggaaggcgcagccgaaaaaaaagaggccgcagacatcaaagaaaaacttgcggatatatgggaaatcggcagtgagaaaattacggtttatatggaaggcggggagaaaaacggccatgaataaaaacggactatggaccatactcaaaaaacagctgatgatcggacaggcgaaagacggagaaaaaccaaaactgacaaaatatcattactttctgttcgtgtttgtgctcggagtatcttttatgctggtgagccagctgttctcttcaccggagaaaaccgggaaggaccaagcggcgcagaccgtcatgtccggccgaacggaagacaaaagcgggcaaaaaagcgcacccgtttttaaggcatcgaaagacagcagcgccaaaaacacgatcgatgattatgaaagagactatgaaaaccagctgaaagaaatccttgaaacgattatcggcgtggaggatgtatcaattgtcgtgaacgtagacgcaacatctttgaaagtgtttgagaaaaataaaacgaaaaaagacaccaccaccgaagaaaccgataaagaaggcggcaaaagaagcgtaaccgatcaaacctctgaagaacaaattgtcatgattcgaaacggggatcaggaaaccccggtcgtcgtccagacgaaaaagcccgatatccgcggtgtactcgttgtcgctcagggagtggacaacgttcaaataaaaaaaaccatcattgatgccgtcacaagggtgcttgatgttccgagctaccgtgtagcggttgcccctaaaaaaatcaaggaggattcataaatcatgctgaaaaaacaaacggtttggcttttaacaatgctcagtctcgtcgtggtattaagtgtttattatattatgtcgccggaaagcaaaaatgccgtgcagatgaaaagcgaaaaaagcagcggagaagtggcaactgaaaaaacgccggctcctgaaacgaaagataagaacggaagcggcacggataaagaagacggaacaaaaggaacgaaagattctaaaggcgcaaaagaggataaagaaacatcagccgaagcatcggacaaagacggatcggtcgctacagaaacagctgatgaaaacttatttaccgcataccgcatggaacttgaagacgcaagaagcaaagaaagggaacagttaaacagcattgtttcaagcgatgatgcgaccgcaaaggaaaaaagcgaagcctacgataaaatgacggcgctgagcaatgctgaagggacggaaaaacagctggaaacgctgattaaaacacaaggctacaaagatgcgctcgtggatgctgaaggagacaaaatcaacattacggtcatgtctgacaaacattcaaacgcaaaagcttccgctatcattgacctggtggaaaaagaaatcaagacgatgaaagacgtcgccgtcacgtttgaaccgacaaaataagagatctccaccgcccgcacccgctgcgggcttttctgatgtcattttagatcagtgttgaatttacacaagcgctcctgtaagataaacatagtatgtacttttagtagcaacccataaatttctattttttatacataggagtggaaactgatgttaaaaatcaacgaaattcatgaactgataaaaagaatcgatgaatcttccatcgacgaattcgtttacgaaatcgaaggcgtaagcctcaaactgaaaaaaaatgaagcgccggcagtgaatgtaacgggacaagctcaagccgttcccgccgcttacgcacctgctccgcaggctgcaaaaccggaagcgcatgaagccgctcctgttcaggaagcgccgaaacaagacgaaaacctgcacaaaattacgtctccgatggtcggaacgttttatgcttcttcatcgccggaagccggcccttacgtaaaccaaggttcaaaagtgagcgaaaatacagttgtttgtatcgtagaagcaatgaaactctttaacgagattgaagccgaagtaaaaggagaaatcgttgaagtgttagttgaaaacggccagctggtcgaatacggacaacctctatttcttgtaaaagctgagtaaggagacctgctattatgattaaaaagctattgatcgccaaccgaggagaaatcgccgtcagaatcatccgggcctgcaaagagctgggcattgaaactgtagccgtttattctgaggcagataaagacgccctgcatgtccaaatggccgatgaggctttttgtatcgggccgaaaacatcaaaagaaagctatttaaatgtaacgaacatcgtcagcgtcgcaaagctgaccggcacggatgcgattcatccgggatacgggtttttagctgaaaacgccgactttgccgagctgtgcgaggaattgaacgtaacgtttgtcggccctacggctgacgccatttcaaaaatgggaacaaaagatatcgcgcgcgacacgatgcagctggctggtgtgccgattgtgcccggttcaaaaggaatcataaaaaataccgaagaagcggtttcgcttgcaggtgaaattgggtatcctgtgattataaaagccactgcgggcggaggcggaaaaggcatccgggtcgcacgcacagaagaagaactgatcaaaggcattgagattacccagcaggaagccgctacggcattcggaaatccgggtgtgtacatcgagaagtacatagaagatttccgccatgttgaaattcaggtgcttgcggataattacggaaacacgatccatctcggagagcgtgactgttctatccaaagacgtctgcaaaaacttcttgaagagtcaccgtcacctgcgcttgattctgaaatcagggagcagatgggcgaagctgcggtaaaagcagcgaaggccgtcggttacacgggagccggcacagtagaattcatttatgactacagagaacagcgctactacttcatggaaatgaacacgcgtattcaagtagagcaccctgtcacagaaatggtgacgggaacggatctgatcaaagaacagatcaaagtggcatccggacaggagctttcgctcagacaggaagacgttgaatttaacggctgggcgattgaatgccgcatcaatgctgaaaatcctgcgaaaaacttcatgccttcacccggtaaaattaacatgtacctgccgccgggcggactcggcgtacgcgtggattcagccgcatatcccggctattcgatcccgccgtactatgacagtatgattgctaaagtcatcacatacggaacaacgcgtgatgaggcagtcgcacggatgaaacgcgcgctgagcgaattcgtgattgaaggtattgaaacgacgattccgttccatctgaaactgcttgaacacgaaacatttgtcagcggagagtttaatacaaagtttttagaaacatatgatgtaatgggctcataatttttgcgggaggtgaattgaatggaagacaacagtgtgcttaaaatggatcatgacgaggctcatttaggcaaggttgaaattgctcctgaggtcattgaagtcattgccggcatcgccgcttccgaagttgaaggagttgctgaaatgcgcggcaatttcgccaccggcgtcgtagaacgcttcggcaaaatcaatcacggtaaaggcgtaaaggtcgatttagccgatgacgggattaccatcgacgtctattgcgtcgttcaattcgggatctcgatcccgaaagtggcggcaagcgttcaggagaatatccgccaaaccttattaaacatgacgtctctgaccattaatgaaatcaatattcatatcgtcggcattcaatttgacacgaaagcccaagaagtcgaaatcgacgaagaaatgtaatgagcgtataaaaaccaaggggatgggcagccctttggttttttatacgtttcccgtcatttcaggcatgaagaaagccggcttacaaacggcagccgagtttcttcatgctgtgaaatccgaatgaaattaatacggtttgtgaaaatattcggcattagggtgaaaaaacctaaatttcgacatgcgattgagaaaaaaatatgttatgatctctttaagcttaacgacaagcggataaagcggatctgaaggagaaagaaaatgaaaagaagaacagctagagaaaaagctttgcaggcactttttcagattgatgtcagcgatattgcaccgaacgaggccattgagcacgcgcttgatggtgaaaaaacagatgccttctttgaacagctggtgtacggagtgatcgaacatcaggttcagcttgatgaaatgatttccggccatctcgtcaattggaagcttgaccggattgcaaacgtagaccgcgcgatcctgcgtctggcggtgtatgaaatggtttatactgacgacattcctgctaacgtgtcattaaacgaagcaatcgagctggcaaaacggttcggcgacgataaagctgcaaaattcgtaaacggggttctttctaacattaaaactgatatcgaatcataggaggaaagaaaatgactgcaacaatcatcgacggaaaagaaacggctaaagaaaaacgcgaacaattggcaaaagaagtagaagagctgaaagcacaaggcgtagtgcccggtttggcggtcattttaatcggagacgatcccgcttctgtttcatatgtgacaggcaagaaaaaagccgctgaaacaatgggaatgaaatttaaacttgaccgctttgactcaagcttaaccgaggcggagcttttaacagtgattgatcagtataatcaaaatccggaattccacggcattctcgtccagctgccgcttccggatcatatttctgaaaaagccgtaatcgagcggatctctcccgataaggatgttgacggtttccaccctctcaacgtcgggaaaatgctgcttggcgaagatacatttctaccatgcacgccgcacggaattgtcgagttattgaaaaagacgaacgtagatctttccggcaaagaagttgttgtagtcggacgaagcaatattgtcggtaaaccggtcggccagctgctgctgaacgaaaacgcgaccgtcacatattgccattcccgtacgaaaaatatgtctgagcatacgaaaaaagcagatattcttgtggtagcggtcggtaaagcgaatttcatcaaagccgatcaaatcaaagagggcgccattgtcattgatgtcggcgtcaaccgtctcgaaagcggaaaactctgcggagacgttcagtttgatgaagcgaaagaaaaagcatctttcattacgccggtgccgggcggagtaggtccgatgaccatcacaatgcttgcgcataatactgttaaatctgccagacgtacgttatcatagataaccggagacagtcacaaaaagtgtgacaatgagcacgatacccgcttcttaaggctcctttcagccagagcgggttttcttagtttagggcaaaaagcctttatgaaaggagtgcaggatgtgagtgaagcggcatatgtcacggtttccgcgctgaccaaatacattaaacgaaaattcgatgtggaccctcatcttgaagacatttggattaagggtgagctctccaatgttaaaattcatacgagaggccacatctattttacattaaaagatgagcatgcccgcatgcaggccgtcatgtttcaaagacaaagttcgaggcttgcgtttaagcccgaggacggaatgaaggtcatcgtaagaggcggcatttccgtctatgaaccgagcggaagctatcagctgtacgcgaaagaaatgcagccggacggtgtgggggcgctctacttagcatatgaagaattaaagaaaaaacttgccggcgaagggttgtttgatgaccggcataagcaggccatccccgcttttccggctacgatcggggtcgtcacgtcaccgacgggagcagccgtcagagacgtcattaccacactcaaaagaagatacccccttgtgaaagtcattgtgcttcccgcgctggttcaaggtgaaaatgccagcagatcgattgtgaagcgcattgaagaagccaatgcacaaaaaatgtgtgacgtcctgatcgtcggaaggggagggggctcgatcgaagaattgtgggcatttaacgaagaaagcgtagcccgggcgatttttgcttccgccattccgattatatcagccgtcggacatgaaacggattttacaatcagtgatttcgtcgcggatatccgggcggcaacgccgacaggagcggcagaaattgccgtccccatacgacggacttaatggaacggacaaaaacggcggaagtccggctgacaagagcgatgcagcagcatatcagcaagaaaaaagaacgggttctatcgctccagtcatcctacgcgttccgttttccgaaacgattgtatacccaaaaggaacagcagtttgatcttttgtatcagcagttccaatcacagctcacagggcttacggacaggaaacaaaggcagctggagcggaatacgtacagattaacggcgctccaccctgaaacccagctgaaacaggcgaaaaaacggtacgaggagcgctcaaatcagctcgcccgaagcatgaatgtccagctgaagcagcttcattcgcagtttcagacggttcttggtaaactgaatgcattaagtccccttcaggtgatggagagaggatacagtctggcctataaagataaagagctgatcaaaagcgttgatcaagtggaacaaaatgatacgcttgaagtaaagatgacagacggcgttctgacgtgtgaagtattgcaaaagagaggcgaacgaaaatgacagaaaccaaaaaaagtgaagagctgacatttgaagaggcgatgaaaggccttgaaggcattgtggcaaagcttgaagaaggagacgtgccgcttgagcaggcgattaattattttcaggaagggatggccctttcaaaaatgtgccatgaaaagcttcagcatgtcgaaaagcaaatggactttattttaaaagataacggcgaacttgcacctttcagcgttcaggaggaagacgaaggtgacaaataaactggacgcatttttagcatcgcgcaaaaaactgattgaacagcagctttctttgtatacggaacggcttgcgatgcctgaaatcctcaaaaaatctatgctgtattctttggaagcgggcggaaagaggctgcgccccctcgtcgtcttagccgttctgaatgcttacggaaaagatgaaaaagacgggattccggtcggatgcgctgtcgaaatgattcatacgtattccttaatccatgatgatcttccttgcatggacgatgatgatctgcgccggggaaagcccacaaaccataaagtcttcggagaagcggcagccgtattggccggagacgggcttctgacagaaagctttaaattgatcacatcccacgtgtctgaggcggtttcagcagaaaaacggctccgtctcgtcgatgagctgatcagcgcggcaggaacggaaggaatggtcggcgggcaggctgccgacatggaagcggaacaaaagcggataacgcttgaggagctggaatccatccacgagcggaaaacggccaagctcctcggtttttctgtgacggcgggcgccattttggcagatgcgccggaggatgaagtcgaaaagctgcgtctgttcagcagccatatcggcatcggatttcaaatcagagatgacatccttgatattgaagggcatgaggagaagatcggcaaaccggtcggctcagacacgtcgaatgaaaagtcaacgtatccgtcgcttttaacgcttgaaggcgcgaaagagaagctggcgtatcatatcagcgaggcgaaacggatcatcagcggcctttctcttcagaaagaactgctgcatgacctctgtgatttaatcgcggcgagagatcattaaaaacggtcctgatttgaaggggctgccgctcctatggtaaaatgtaagcagtttcgatgaaaatacaaagggagtctttttcttttttcaaaaagacactgtttaatttgcagaaattcatgctgaaagtgagttgatccgctttggatcttttatcaatacaggacccgtcatttcttaaaaagatgtcaattgaacagctggaagagctgagtgaggaaatccgcaatttcctcatcacatcgctgtctgcctctggcggccatatcgggccgaacctcggggttgtcgagctgacaattgcgcttcacaaagaatttgacagtccgaaagataaatttttatgggatgtcggacatcagtcctatgttcataaactgttaaccgggcgcggcaaggagtttgaaaccttgcgccaatataaagggctttgcggtttcccgaagcgcagcgaaagcgaacatgacgtatgggaaacaggccacagctcaacatcgctctcaggcgcgatgggaatggcagccgcccgtgatattaaaggatcgaaagaatatatcatcccgattatcggagacggcgctttaaccggaggaatggcgctcgaagcgctgaaccatatcggtgatgagaaaaaagatatgatcgtcatcctgaatgataatgagatgagcattgcgccgaatgtcggggcaattcattctatgctgggacggcttcgcacggccggcaaatatcaatgggtaaaagacgagcttgaatatttatttaagcgcatcccggccgtcggcggaaaattggccgccacagcggaacggataaaagacagcttaaaatatatgcttgtgtcaggcatgttttttgaagagctgggctttacgtatttaggccctgttgacggtcattcctaccacgaactgtttgaaaacctgcaatacgccaaaaaaacgaaaggtcctgtccttttgcatgtcattacgaaaaagggcaaaggctataaaccggctgagaccgacacaatcggcacatggcacggaacggggccttataaaatcaatacgggtgatttcgtcaagccgaaagccgcggcgccttcatggagcggacttgtcagcggcaccgtgcaggagctggcgcgcgaggatgacagaattgtcgcgattacaccggctatgccggtcggctctaagcttgaaggatttgcgaaagaatttcctgagcgcatgtttgacgtcggaatcgcagaacagcatgcggcgacaatggccgcgggaatggcgcttcagggtatgaagccgtttcttgcgatttattcgacctttttacagcgggcgtacgatcaggtcgtccatgatatctgccgtcaaaacgcgaatgtatttatcggcattgaccgcgccggtttggtcggcgctgacggggagacgcatcaaggcgtctttgacatcgcctttttgcggcatataccgaacctcgttttaatgatgccgaaggatgaaaatgaaggccgccatatggtcaatacagccctttcatacgaggaaggtccgattgcgatgcgcttcccgcgcggaaacgggctcggcgttaagatggataaagagctgaaaaccattccgatcggaacatgggaagtgctccgtcccggaaaagacgcggtcattttaacattcggtacgaccattgaaatggcgctggaagcggctgaagaactgcaaaaagaaggcctgtccgtgcgtgtcgtgaatgcgaggttcataaagccgattgataaacaaatgatgaaggccattcttaatgaaggtctgccgattttaacgatagaagaagctgtgcttgaaggcggattcggcagcacgattcttgaatacgctcatgacctcggcatgtatcatacaccgattgacagaatgggcatcccagaccggtttattgaacacggcagcgtaaccgccctgcttgaagaaatcggtctcacgaaggctgaggttatgaatcggataaaactgctgatgccgccgaagacacataaaggaattggatcatgacagcaaaaaaagaacgattagatgtacttcttgtagaaaaaggccttgcggaaacgcgggaaaaagcgaaacgcgccattatggcgggcatcgtatactcaaatgaaaaccgattggacaaaccgggtgaaaaaatcgcccgggatcttccgttaacggtaaaaggaaaccctcttaaatacgtcagcagaggcggattaaaacttgaaaaagccttggaagtgtttcctgtctcggtaaaaggcaaaacgatgattgacatcggctcgtctacaggggattcacggattgcgccctccaaaacggagctgagcggtcctacgcagtggatgtcggctataatcagcttgcttggaagctcagacaggacgagagggtcgtcgtcatggaacggacgaatttccgctattccgagccttccgatttcacagagggtttgccggaatttgcgacaatcgatgtttctttcatctcactccgcctcattctgccggttttaaaaacgctgcttgtaccggggagcgattgtatcgcactggtgaagccgcaatttgaagccggacgggaatccgtcggaaaaaaaggcattgtcagagatcccggcgttcatgctgacgttctccgccgcatgaatcaatttgccgcttctgaaggatatacagtgaaaggactgtccttctcaccgattacagggggagacggcaatattgagtttctgcttcatctggaatggggcggagaagacggaaacggcgctgaactgccggaagaagatattctccgtatcgtccgcgaagcacatgagacattaaaagccaaaaagacagatgtaccggaataatagggggctattattccttttttctgccatcatgtactttttatcaagaagcggttaacataatgacaagaacagcttgaaaacagaggtgcttacatgacaaaaggccaaaggcatataaaaatcagagagcttattacaagccatgagattgaaacgcaggatgacttagttgacatgctgagagaagaaggatataaggtaacccaggcgactgtctccagagacattaaagagctgcatctcgtaaaggtgccgacgaacaacggctcctacaaatacagcctgccggcggatcagcggttcaatccgctgtcaaaactgaagcgttcattaatggatgcgttcgtaaaaattgactcagcaagccatatgatcgtattaaaaacgatgccggggaatgctcaggcaatcggcgctctgatggataatctcgaatgggaagaaatcatgggcacgatctgcggagatgacacgatcttaatcatctgcaggacgcctgaagatacggaaggcgtacaaagccgtcttttggagctgctgtagcgtaattatcagataaaaggtggaatgctgtttgttagctgaactatcaataaaaaactttgccattatagaggaactgacgatttcgtttgaacgggggctcaccgtcctgacgggagaaacaggggccggcaagtcaattattatagacgccgtttccctattagtcggcggacgcggctcgtccgaatttgtccgttacggtgaaacaaaggccgagcttgaaggactgtttctattggacagcggtcatcccgtttttgaagtatgccgtgagcagggaatagacgcatctgacgacatgattgtcatgagaagggacatcaatgccggaggaaaaagcgtctgccgtgtcaacggaaaattagtgacgattgcggctttaagggaaatcggcagacttttattagatattcacggacagcatgataaccagctgttaatggaggacgacaaacacttggagcttttggataaatttgcgggcgctgaggccgaatccgcgcttcaggcttaccatgaaggctatgagcgttatatggagctgctcaaaaaagtgaagaagctgtcagaaagcgagcaggaaatggcgcatcggttagacctgattcaatttcagcttgaagaaatcgagtcggcgaagcttgaattgaatgaagacgaacttcttcaggaagagcggaagcagatatccaactttgaaaaaatttatgaatcattgcaaaacgcctataatgcgctccgcagcgagcaggggggcttgactgggtcggaatggcctctgcccagcttgaagatatttcggatatcaatgaaccgctgcaaaagctgtctgaaagtgtgtcaagttcctattatctgctggaggatgcaacctttcaaatgcgcaatctgttagatgatctggaatatgacccggaacggctgaattttattgaaacccgtttaaatgagatcaaacagctgaagcgcaaatacggagcgacggtagaagacattttggaatacggctctaaaatagaagaggaaatcgatcaaatcgagaaccgcgacagccaccttgaagccctgaagaaggaattggagtcggtcggcaaagatgtggccgtagaagccgccaatttatcaaaaatcagaaaagcatgggccaagaaactggcggaagcgattcatcaggaattacaaagtctgtatatgggcaaatcaacgtttgatacggaatttctcgtgaaaaccgatccgtcagccagtgaagcaccggttgttaacgggcagcccgtgcagcttacccaaaaggggatcgaccttgtgaagtttttaatttcaacaaacaccggtgagcctttaaaaccgctgtcaaaggtcgcttccggaggcgagctttcaagggtgatgctggcgatgaagagtattttttcttcccagcaggatgtcacctccatcatctttgacgaagtggacaccggtgtaagcgggcgggttgcccaagccatcgcggaaaaaatccataaagtatcgaccggttcacaggtgctctgcattacacacctgccgcaggttgccgctatggcggatacgcaccttctgatcgcaaaagaattcaaagacggacggacgacaacgcatgtcacgccgctttccaagcaggataaggtagcggaaatcggccgcatgattgcgggtgttgaagtgaccgatctgacaaaacggcatgcacaagagcttttaaaacaggccggacaggtaaaaacgacaggataagctgctgatacaggcagcttattttttgttccatttctctaacagtgtatccaatgtttttcttcgtatgccggttataaatcaagcgcaggaaggcaaaagtatagatgtagcagaaaaagaaagtggtgtgggataggagcgaggagagtgaaggaatgaatgcacgataacatgaggaaagcaataggtgtaattctccttgtttctttactaagtgtaggcttttttaagccgtttaaagaatatttactgataccgtcagaaatgagcgtctttgaaaaccagacacaggccgttccggtcaatgcatcaataagcgctgaaaagggcgaattatcagaagcctttacgctgaaagaagagcacggtcatgcaaacataacagggcaaacacaaggcaggtcagaagtagtatatgatcttgccggatttcccattaaaaaaacgaaagtgcgtgtccttcctgaattgaaggtcattccgggcggacagtccatcggtgtaaaactgcattcagtcggtgttttggtcgtcggttttcaccaggtgatgacaaaggatgggaaaaagtctccgggagaacaagcgggtattgaatctggcgacatcattattaaaatgaacggacataaaattgaaaaaatgagcgacatcgccccgtttattcaaaaagcgggcaaaaccggtgaatctctggatttattggtgaaacgcgataagcaaaaaatcaaaacaaagctgattccgacaaaggacgaagccgaggggaaatatcgaatcggcctttatatccgtgattcggcagccggcatcggcaccatgacattttttgaaccgaaaacaaaaaaatacggcgcattgggccacgtcatctctgatatggatacaaaaaaaccgattgttgtagaagacggagaaatcgtccgttctactgtaacatcgattgaaaaaggaaaaggcggcaatccaggcgaaaaactggcaaggttttcgtcagaacggaaaacgatcggcgatattaaccgcaacagcccgttcggcatttttgggacactgcatcagccgattaaaaacaacatttccgacaaagcgcttccgattgctttgtcaaatgaagtaaaaaaaggacctgcgcaaatgctgacggttatcgaaaacgataaagtagagaaatttgatattgaaatcgtcagcaccacgccgcaaaaattcccggcgacaaagggaatggtattgaaagtgacagatccgaaactgctgaaaagaaccggcggaatcgttcaggggatgagcggaagcccgatcatccagaacggaaaggtcgtcggagccgtaacccacgtatttgtcaatgatccgacaagcggctatggcgttcatatcgaatggatgctgtctgaagcgggtgttgatgtttacgggaaagacaaagcaagctgactgccggatgatccggcagtttttttatgtgatgcgttcttcacttctttccgggattcatgtaaaataagacatgaagatttttcgacaaattcacgtttcctgatttgtcaaacttaatttttagtcgaaaaacctagaaaatgctagaaaaacaaagatataccactattattggtaaatatggattttttaaaaggggaagtagtggttttgtcgaatgtaacatatagcagtcaaatgggttgcgtcctgttaatacattgggggaggaagaaacgtggagaaaattaaagtttgtgttgctgatgataatcgagagcttgtaagcctgttgagtgaatatatagagggacaggatgatatggaagtgatcggcgttgcttataacggacaggaatgtctttctttgtttaaagataagaatcccgatgtgctcgtgttagacattatcatgccgcatctggacggacttgcggttttggagcgtctgcgtgaatcagagcttgagaagcagccgaacgtcatcatgctgacggcattcggtcaggaagacgttacgaaaaaagccgtcgatttaggcgcatcctatttcatcctgaagccgtttgatatggaaaaccttgtcggccatatccgccaggtaagcggaaatgtcagcagtgtcacacaccgtgcgccgtctgcgcaaagcagcattatccgcagccagccggagccgaagcggaaaaatctcgatgccagcattacaagcattatccatgagatcggtgtgcctgcccatatcaaaggctatctttatttgcgtgaagccatttccatggtgtataacgatattgaactcctcggcagcatcacaaaagtcctttatcccgacatcgccaaaaaattcaacacgaccgcaagccgtgtagaacgggccatccgccacgccattgaagtcgcatggagcaggggaaatattgattccatttcttcactgttcggatatacggtaagcatgacaaaagcaaaaccaaccaactcagagttcatcgcgatggttgctgacaagctgagattggagcataaagcttcgtaacgcaagcctttggctaaatgtctttttgcgccttctattccgtgcatgaacgcggaagagaaggcgttttgagattttgctgacgaaaacaatgggaaccactcacgccggtacttgttctatacataaatacgggaactgccgtctatacgtataataccggagctgatattttaatgattttgccgtctctgaaataaaagcgggggatgcggcggcttaacacagaaaggacttcgtagctgatcgtaccgagcatttcggcaatttcatcaacggaaatctcggctccttgttgtttgccgtagatgacgacttcttctccttgtttgccctcattctcacctaaactgaccattatcatatccattgtcactctccccgccaccggcacccgtctgccgcggtgcagaataaacccgcggttggacagggcgcgggagtaaccgtcagcatagccgatcggaatcgtcgcgatgatttcacccggttcggcgatatatgtggcgccataactgacggtccggggatctgtcaccatagctttcacataagcgatacgcgcctttaaacttagtgcgggtgtgagatccacgaggttcagttcctttatcgaggcggacggatataaaccatataacccaatacctaaacggatcatgtcggcgctgaattccgggaatgcgatagcggcggctgtattgcacatatgcacggtaggcagcgtaatgtcttgattttttaaaaagcggagaaagctgataaacttttcgtgctgcagcatcgtcagctcagtgtccggttcatccgctgttgaaaaatgtgtaaagatgccatcccatgacaggtatgtactcgacttgagcgctttcaccactgctaaaagatcttcttctgtgcgcacacccagccggcccattccggtatccacattgatatgaatggacagccgtttcgactctgcttctttttccaatatccgattcgcttttttgatccagctgacctgaaacgctgataatgtgatgttccaaacggcagattttttcacacagctgagagctgtgaagccgagcacaagaataggcgctttaattcccgctctccgtaacacaattccctcttcgacgctggcgacagcaagctcgctcgccccgctttccagtgcctgccgcgctacttccacagagccgtggccataagcgttcgcttttacgacggccataattttagacgtattcggaatatggcggcggatcgcccgtacgttcttttttatcgcatcaaggtcaacttcaatccaaacttcccggcaaagttttttcatcacgattccttctttccttaatgagattcagtactcatgctttcaatctgcattctattcatctttaactgaaatcattcaaaacatgagaaggtgaccgctgatgtttaaaatcaagttttcgggaaagcatgcgcctgctttatttatgcagtaagggcagcatggcggcccttacaatgactttacaatattctgatctgaaaattgatgttcaaacattttggactggcttacagcattgttttgaatgacaatgccgatatttccccctccggcaccgaaaacggtttttgatgcagtcagcggactgatggatatggcgccgccaacattgacaactccgtttcctgatacgttgtttatcgtaatcgggcaaccgctcattctattttttctcctttctctcacagtctactaactatatgtacgctgtgatatggaataagattaaacaaaacggcaaaaagaatccggctgctgccagccggaaagggagggaaatacggatatcataatgttttcgttacattttgatcagagtattgagagtttgaagattgagatgtgctggattgattcatttgcaggaccatacctgtatttccccctcctgagccgtagacggtttttgatacggttaaaggacttatcgaaaacgcaccgccgacattgacaaccccgtttccggaaagactgttaatcgtaatagggaaaccagccatcatatacggtctcctttctattaatctatttactatatgtacgctgtgtgttagaaataggagtaaacaaagcggtaaaaacttgtgaatcaaaaaaactgccggacatccggcagttttttagtctacttttcaaacggcacccagccgcctgtattctgaatcatttcccataacggttcaggaagtcggtatttatcaatttcagatgcctgaatggctttttcgatttcctgttcgcggccttctttgaccagcaccgcccattcggggttaatcaaaatgacacgtcccagagccaccagcggaattccgctttctaatacggcaagcgcttcgtccgcggtatagatggaaccgacggccatcagcggcactttatggccgacgcgttcgtttaataaatccatccgggtccgtgaagtatccgcgccgcggcgggctttggaattgacatccatcagtgaaatatgcagataatccaagttctcttccgcaagcgcgtcggcgagcatgaatgtttctttcattgtaagccccggtgtttccggctcttccggtgacaggcggtagccgagaacgaatggattttcagcgtgtgtatcaatcgcctgtttgacagcgtcaacgactgcaagcgggaacgcaaggcgcttttcatcgcttccgccccagcggtctgtgcgccggtttgttttcggtgaataaaattggtgaatcaggtacccgtttgccccgtgaatttcaacaccgtcaaagccggcttcaatcgctctgcgtgtcgcttcgccgaatgctttcacgatgtgctcaatttcttgttctgtgagagcacgggacgtttgtctgccgtcttcttctgagccgctcggactgacgacgtcgttgtttggcacgagttcaggagggcattccaagcctccgtggtgaatctgcacaacggctttcgctccttgagactggatcgcctgagcgagttttttcaagccgggaatgtgagaatcatcatagatgccgggctggcctggaaacgctttgccgtccggcgttacgtttgcacatgccgtaatgaccatgcccatttcttttgaacggggagtaatgtagcttaattcacggtcggaaatcgttccgtcatcatttgatgaatagtgtgtcatcggtgcgactgaaatacggtttggtatagtgacaccgctttcgaacgtaaaaggttcaaacagcggtttataagtttgcttcatcatttcgccttcttccttaggagtttaactcgtccgtattctagcttatgttttcattgtgtgcaattattttgcttgttcttcttcctgaggttatgaccggctgaaccatttaaacgaatgaaacggttttctccgttccttttcaggatctttatatcctcctgaaatttgatggccgatcgagctgaatatgacagcggcggcgaagaggagaatgatttttttcatatgcatatcttctttcttatcttttacatggttatttataagcatacgcttgtgcgaaaaaaccgtcaatttgtttattcttttttccactttcctgcggcgaatatcgttccgatctgaatcacaacacttaacagagcgcacactgccacaactgtgttgctgtccatagaagacaccctcctttttgttaggttgatgtatcatatgacggctgtctctgttttgacaaaaccgtaatgcggtgtttcatatttttcaacacaaaaagggcgcttttttaagcgcctttacttttttttcagccggttcaaagcgatttgaacggcgatggcgtcatccaggtagccgatcggaaacatgtaatccgggataacgtcggtcgctaaaatataatacagcagcgcgctcccgagaatcgcgcggtcttcagccggtgttgattcatccatatactgatgatgcatgtttttcaaatggtcaataaaagggccgacgctttcttcattgtccattttcttttgaaactcatcgcaaatcaggcgatggccctgctgggttttggcgtattgttcatatctggtcagttcacgctcaatttgctcccgggaaaaaggctgatcaaacatctcggccatattcagcatatcctgaatcgcgtgcatcgggtcttgcggcgcagcttctttttcatggccgatgtctatgcctgacgcctcaagcaattcctccagcggggtgcggaggtgttttgaaaattcctgaagatgctttaaattggccttctgtttgccgttgataatccgggagatagtggccgtatcaatgtttgttaaggcgccgagttttctcatggagagcgagtgcttatcaagcagtgattttaaaaggggtcccagtgtcttatttttattttctgtcaagggtgtcacctcgtttccgccggaatgatgatcgtcaatcaataatttttgcagaaaaggtaccttttctgtgctgctgaataggatagtgtagattcaacggcacaacatgttgaaaagacatcaaagaatggagagaaacgaacatggcttggttattgattttaggtttggcagtgtcctcaagcattgataatttaggagtggggatgtcatacggcatcagaaaaatcaaaatatcgcatgcgtcaaatatgatgatcgcttttatctgttttgtattcagttatatcggaatttatttcggcaaatggatttcagccgttttaccgggctttcttcctgtattgctggcggcgtttattttatctgtcatcggtatccgcatcattctgctggctgtgccgagaaaaacagcgcgtgttggcgggtcaggaaaaaaaggccgttttgccggtctgctgcaaaatccggaggcagcggatgccgacggttcgggagaaatcggtatattggaatccttggttctcggggtggccgtatccgcaaatgcgctgaccaacggattaagcgcggggttgatcgggctttctcccgctgccatttccattactgcggcggtcggaagctttctgaccatatggatcggctgctcgcttggaaaaaaagccgcttcattgcgcatcggttcttttcacgtcggacagttcagcacggtgctgagcggagtgattattctcatcattgccgccaatacgctgctcttttaagttgtcccgttcattttatgaaaagctcaaaataaatatgaatgtttctattcgggagagtgcatgacgcggctctcttttttgccgatctgatattttttcaaaatgaacagaaagtcgtccgtttccgttaaattctgcatattcggccttcagacagaacctttttcatagactgatcagcttgttttctttctaagttcaggtaaacagcaggtcagatagccttcattccaaagatggaaaaacgctggaggaatggaggctccctttacaaatcggccattctgttcaaagataaagccgaatgagaaaacgtgaggtgatctgtgtgaagtctgccatacttctgatcttcaccgcatggctgttatcaggctgcgagtataccgcggaggctgatgcggcgccgtcatttacacaggaaggaacatttataaaagcggccggaaacgatacgatcgcggtcgaaattgacggagaaaggcaagaggtgaaggtgcctttcgctaagcggtttgaatgtcagtcgctgcctgaacatacggcggtgcaaatcacctataaaaaagagagcaacggacaattacggcttgagaaactgaaaaaagaaacagatatgtgaaaacggggaggaaaaaaacgtgggtttactgacaaaaagcgctgctgccttcggtgccgctctgcttctgcttgcgccgtccgcttatgcagccgaacctttgcaagggaaaaccatctatatagatgccggacatggcggagaagacagcggggccggcggaaatggactgcttgagaaaaacatcaatttagcggtgtcaaacaaggtgatcgccaaattggagacagaaggcgcaaaacctgtagcttcaaggactgatgatacttttttacgtttggacgagcgggtggcgaaagcgagcgccagccaatccgatttattcgtcagcctccataccaattcagccgtatcaacggcatcgggcgcggaaacgtattttaattcgacatatgaaggagcggacagcgaaaggcttgcttccgacattcagcagcagcttgtcacgtctttagggatgagggacagaggcgtaaaagaagctcctttttatgttattacatattcaaagatgccgagtgtgctggctgaattaggttttatcacaaatcctcaagatgcggacaagctgaaaagcgataacggacaagagcacgccgcggacgccgttgtaaacggaatcgaaacctattacagcggacggtaatgataaaatatgtgtaaatagcgccctcctgatgtgcataacgattataatagagaaaaccgatgacaaacatctgaggtgacacatatgacgaatatttttgcccaccggggggcgtcgggcgactgccctgaaaatacgatgcccgcattcaaaaaagcgattgaggacggggctgacggaatcgaacttgatgtacagatgacaaaagacggccggatcgtggtcattcacgatgaaaccctcgaccgcacgacatctttgaaaggatttgtgaaagatacggcgtatgacaaaatcagaaccgccgatgccgccggaaaatggaaagattcttttaaaggtgtcagaattccgcttttgtccgatgtgctgcgttttgctgaacgtgctgattttctgataaacattgagctgaaaaacagtgtattccgttacgaaggaatggaagaagaagtgatcaaaaaagtcagatattacggactggaaaagcgcgttattttttcttcatttaatcatgagagtctcgcggtgtgccacgccctggcgcctgaaattgaacgggcggtgctgacaatggatgtgctgtaccggcctgaacgttatcttgccgccattcccgcttcgggttatcatccgaagctcggcacgccggcggtcagcgctgaagtgatcacacatcttgcaaaacaccaagcggcgctccgtccgttcaccgtcaatcgtcctgaggatatgaagcggctgatgaaagcggggatagacgcgatttttacagattatccaaagctggctgtttctataaaagaagaatgccgcagctgagaagactggtcagacagtcttctttttttatgggcgggaaaaaggcggtgcactcataactcggtcagccggttcatatattgtaacagggcgttttgtgtaagcgttatcttttatcttattgaaagtgaggcaaaattgtgggaaaaacggttatcgtcagtgcggcaagaacgccgttcggaaaattcggcggcgcattaaaagaggtgaaggcatccgagcttggcggcattgccataaaagaagcaatcaagcgcgccgctatcagtgaaagcgaagcggaaggagcggtgatggggatggtcgtccaggcgggtgccgggcaaattccggcacggcaggctgcaagatatgccgggcttccgtggtctgttccggctgaaaccattaataaagtctgtgcatcagggctcagagccgttaccatctgtgatcaaatgatccgggcgaaagacgcggacgtgctgattgcaggcggaatggaaagcatgagcaacattccgtacgccattccggccggccgctggggtgtgaggatgggggacggggtttttcaggatttaatggttcatgacgggctgacctgtgcgttcgaccaggtgcatatggctgtccacggaagcactgcggccaaaaagtacggcatttcccgagatgaacaggatcattacgctcttttgagtcagaaacgcgcggctgaggcggctgatgcgggcaaattgcgtgaagaaattgtccccgtcacctggaccggcaaaaagggcaaacagcatatcgttgaagcggatgaggggctgcgtcctgatacaagccttgagcagctcgcagcgctcaagccgattttcacagccgacggaacggttacagccggaaacgctcccggtgtaaatgacggggccggagcatttgtgctgatgtcagaggaaaaagcagcaaagcagcatgtcaggccgctcgcagcgatacttggctttgcgtccgtcggactggaagcgtccgagctggcaagcgcgccgggagaggccatcagccggctcttgaaaaaaaccggactgtccgttgacgatattgatttgtttgaagtaaatgaagcatttgcgtccgtcgtgctcgtgagtgaaaaaatagccgggttcagccgggagaaagtgaatgtaaacggaggggcaatcgcgttcggccacccgatcggcgcaagcggagcgagaatcgtcatgagtttaatatacgaattaaagcgtcgcggaggggggttaggcatagcggctatatgcagcggagcggctcaaggagatgccgtcctgctggaggtgtactgatcaaaggagggagcgccggatgaagatgaaaacaatcatggtcgcaggtgccggtcagatgggggcaggcatcgctcagacggctgcagaagccgggtttgccgtcaagttatacgattgggagccggaaacggtaacaaaaggtcttcaccgcataaagacaaacctggagaaagagcaggcaaaaggacggaagtcacagcaggagacagatgccgttttcagccgtatttccccggcggagctcacagaagcgggagatgctgattttatcattgaagccattgccgaaaacaaaaaagcaaaagcggaattgtttgacacacttgataaaatctgtccccctcatgccgtattggcaagcaatacgtcttctcttcctattacggagcttgccgcggccacaaaaaggcctgaaaaagtaatcggcatgcattttatgaatccggttccggtcatggagcttgtcgaagtcatcagaggactcgccacatcggaagaaacggcggaaacagtaaagaagcttgccgtccggatgaataaaacccctgtcgaagtcaatgacttcccgggctttatatctaatcgcatattaatgccgatgattaacgaagccgtttattgcctttacgaaggagcagcttcaaaggaagcgattgatgaggtgatgaagctcggcatgcgtcatccgatgggtcctttaacattagctgacttcatcgggctggatacgtgcctttccattatggaggttctctacgcggggctcggagatccgaaataccgcccatgccctctgctcagaaaatatgtcagcgccggctggctcggcaaaaaaagcgggcgcggtttttatgagtacggcagatgacgtaaagatcatgaggggagacggcagccatgcattttactgaagagcacatcatgatgaggaaaatggtgcgtgattttgcccgcaaggaaatcgcaccgatggttgagctcatggaatcaacagatgaatttccggagcggctgattaaaaaaatgggcgaagcgggattgatgggcattcccgtcccggaagcttacggcggggcgggtgctgatacaacatcttacattttagcgattcatgaaatatcaaaagtcagcgcggccgtcggcgtcattttgtccgtccacacatcggtagggacaatcccgattttgcatttcgggacagaagcccaaaaacaaacgtatattccgaagctggcagcgggcgaatatattggagcttttgcgcttactgagactcactccggatctgatgcgggaagcctgaaaacaacagccgtgcgaaaaggcggttcatatattctgaacggttcaaaaatctttattacaaacggcggagcggcagatctgtatctgacatttgccgtaaccgatccgggtaaagggagaaagggaatttcagcgtttattgttgaaaaaaacacacccggtttttctgtcggaaaaaaagaaaaaaagctcggattgttaggttccaatactgccgaattgcagtttgatcaagcggaaattccgattgaaaaccggctcggcgaagagggcgagggtttttcaatcgccatgaaaaaccttgacgtcggacggatcggcatagcggctcaggcgctcgggattatcgaagcggcgctcggctgctcggcggagtacgccaaaacccgcagccagttcggcagacccatcgcttcgaatcaggccgtttcatttaaattatctgacatggcaacgaatgcggaagctgccaaattattggtctatcatgcggctgatctgtatcagcgagggcttccgtgcggaaaagaagcatctatggcgaagcaattcgcgtccgatgcggcgatgaaagcggcggtggaggctgtgcagattcacggcggctacggctatatgaaagagtatcccgcggagcgtttatttcgggatgcgaaagtcacgcaaatctatgaaggaaccaatgagattcaaaggctgattatttctaagtatcttcttcaataaaaagtgcgcaaaggagcgaaactatggaatcttattctcccggtttagatggcgtcattgcggtggaaacggggatttctttcctggatacacagcagggcagtattttaatcaaaggccacgatctgattgagctttctaaaacggccggctatatggacattgttcatctcttattggaagacagacttcctgatgcgaaagagaagaaggcgcttgaagaagacgttcggcgcggcggacaccttcccgaggaaatcttgcgtatatgccgtctgctgcccgaacgtactcacccgatggacggactgaggacaggtttgtccgcgcttggaggctttgataaggatattgataaccgcacctcttctgtaaatcggcaccgtgtccgcgggctgataggcaaaatgcccaatctgaccgtcaacagctatcgagtcatcaacggactggagcctttagcgcctgtcggaaccttgtcgtacagcgcaaactttttatatatgattaccggaaaaacgccgtcctccttggaagaagaaatattcgaccggtcgcttcttttatacagtgagcatgaattgccgaactcaacgtttacggcccgtgtcattgcttcgacgcaatcggatatttacggcgctctgaccggagcagtcgcctcgcttaagggaaaccttcacggcggagcgaacgaagcagttatgtacatgcttgaggaagcgaaggatacagacgggtttacacaattattaactcaaaaactcgcaaacaaagaaaaaatcatgggcttcggccaccgtgtctacatgaaaaaaatggacccgagggcgctcatgatgaaagaagcgttgaaaaaactgtctgatctttcaggtgatttccgtctttatcatatgtgtgaagcaggagaaatcgtcatgcgggagaaaaaaggcctttacccgaacttagattactacgcagcgccggtctattacatgctcggcatcccgatcccgctgtatacgcctatattcttcagcgcacggacggtcgggctgtgcgcccacgtcattgaacagcacagccgaaaccggcttttccgcccgcgtgtccgctataccggagcgcgtctgtaaacagatgagaaaggaagatgaaaacatgacagaaccccgccgaatggacgccgtaatcgaagagatttctgactacgtgctccatcaggagattgacagttcggaagctttcactacggcaggacatgtgcttcttgatacgataggctgcggaattttggcgctcagctatcccgaatgtacaaagctgctcggcccgattgtcccgggaacctccgtgcccaacggcagcagagtcccgggcacgccttttgttttagacccggtcacggctgcctttaatatcggctgtatcaacaggtggctcgattataatgatacgtggcttgcggccgaatgggggcatccgtctgacaatctcggaggcatattggcttgtgcggattatatatccagagtgcggatttcagaagggaaagaaccgcttaccgtgcgtgatgtgctttgcgcaatgatcaaagcgcacgaaattcaaggaattctcgctttggaaaacagtttaaacagagtcgggcttgaccatgtgctgtttgtgaaggtggcgactgcggctgtttgcgcacaaatgctgggcggctcaagagaggaaatcaataacgccgtatctcacgcttggattgataattcaagcctcagaacgtatcgtcatgcgccgaacaccggatcacgcaaatcatgggcggccggcgacgcgacgagcagaggcgtatatttggcccttatggcgcaaaaaggtgagatggggtacccgacggctctgaccgcatccgggtggggatttcaagacgtattatttaaccggcaggaaatgaagcttgcccgcccgcttgggtcctatgtgatggagaatgttttgtttaaagtatcctatccggctgaattccacgcccagacagcggcggagtgcgcggtccggcttcatccggaggtgaaagaccgcatcgaagacattgacaggatcacgattatgacccatgagtcggcaatccggattatcgataaaaaagggccgcttcacaatccggctgaccgggatcactgcctccagtatattacggcaatcgggctgcttttcggagatatcacggcggatcattatgaagaggaaacggcgtctgacccgcgaattgatacattgcggagcaaaatggaggtgacggaacataaagcgtactcaaaagattacttagacccgaataagcgatccatctcaaatgccgtacaggtgcattttacagacggcacggctacgggacggattgaatgtgaatatccgctcgggcaccggttccgcagaaaagaagccgttccgaagattcttgccaagttttcagcaaacatcagcactcatttttcattgaagcagcagcggaaaatcgaagaggcctgtaaagatagcggccgaatgcagaagctcagcgttagtgaatttatggacttatttctcatataaaataggagggtgacaaacatgacgtggatcgtcagcaagcagtcgtctcaagaggagcttgcagagcggttccgtacgctgatggcagcgccggatctattgcagattccaggcgctcacgatgcgatggccgctcttattgccaagaaaacgggtttttcggctctttatttatcaggcgcggcttacacggcgagcagagggctgcccgatttaggcatcatcacgtcggcggaaatggctgaacgggttaaagatctggtccgctcgtctgatctgcccgtccttgtcgatattgacacgggtttcggaggcgtgctgaatgccgcccggacggcgaaagaaatgtatgaagcgcgcgcggccgccgtccaaatggaggatcagcgcctgccgaaaaaatgcggacatctgaatgggaagcagctcgtgccgattgaagaaatggcgcaaaaaatccaagcggtcaagcgggccgcgccgactcttcttgttgttgcgagaacagacgccagacagcaggaagggctggagggggcattaaaaagggcgtccgcttatataaaagcgggtgctgacgctgtttttccggaagcgctccaatacgaaagtgaattcagagcgttttccaaacaaatcagtgtgccgattctcgcaaatatgactgaattcggacaaacgccgtattacagtgctgatgaattttccgatatgggctgtcagatggtcatttacccggtcacgtcactcagaacggctgccaaggcttttgagcgtattttccgccttctgaaagaagaaggctctcaaaaagaggggctttcggatatgcagacgagaaaagaattatatgaaacgatcgcttacgatgactatgaagaactggatcaatccattgccaaaacgatactgccggacgactgaaaaagcccttttttgcaagggctttttttacagcttttttttcctgaaccgcgggctgacttgattgcgtttccgatctctgtacaaaataaacccggccagaacataaaggccgaacaaaaaaaacgccaatccggccgccccctgaagaaaaagggacggaaacggggaaaacgcatgcccgaataatgcatctctcatcagtttaatgccgagcgccgcgacagcgccggggaggaccagaatcaaaagcgcaacaagccggctcatattcagaaaacccctttacgatatgatttcctttattgtccaatcgaaaaaatattttgtcaagagatcaaaacgtggtaacataggggttgtgcaaattattgcaacgggaaatacaggtgtgcaaattttttcatataaaggggtatcgggatgcagaaggtgctgattataggtgctggtaaaggaggcacggcgctcctacagattttgatgaaaacaaaactgatccggattattgcggtggttgatcaagatccggaggcgcaagggctgcaagaagcccggagatatggaattgcaacctcatcagattggaaaccctacataactgaagatatagatattatcatccatacaacaggcgataaagcggtcatggatgagctgctccatgagaaaaaagaacaaaccatcgtcatgccgggaaaattggcgtacatggtgtttcagctgatggaggaaaaacagcagcttatccaaatgctgaagtcgcagacgtataagcatgaccggatttttaattcaacgcacgacggcatgatttttatagacgtcaacgaaacgatcattttatttaatcagatggcagaaaaaatggtcggccgaaaacgggaggatgtcatcggccgccaaattaaagatgtagtgccgaacacaaagctgccgcggattctggaaacgagagagccggaatataaccagaagcagcttctcggcaagcacctgcagattgtcacgacaagactgccgatcattgatgaaggcggaaaacttctcggcgcgttatgcgtgtttaaagacatcaccgacgcagttgaactggcggaagaggtcacgaacttaaaacaaatccgcaccatgcttgaagcgattattcaatcgtcagacgaggccatttccgtcgttgatgaaaacggcatcggaatgttaatcaacaaagcatatacaaaaatgaccgggctgtcagaaagcgaagtcatcggaaaacccgcttccaccgatatctcagaaggggaaagcatgcacctgaaagtattggggacaaggcggcccgtgcggggtgtgaggatgaaggtcggccccaataaaaaggatgtcatcgtaaatgttgcccccgttattgtggatggtattttaaaaggcagcgtcggcgtcatccacgacgtgtcagaaattaaaacgctgactgctgagctgaatcgggcgcgccagatcatccgcacgcttgaagcgaaatacacgtttgatgacattatcggcacgagtgaacaaatgctggttgcccttgaacaggcgaagctcggggcgaaaacgccggcgacgattctgctgcggggagaatccggcacagggaaagaacttttcgcccacgccatccataatgaaagcgaccgaaaatacaataaattcattcgggtcaattgtgcggccctgtctgaatccctgcttgaatccgagcttttcggctatgaggaaggcgcgtttacgggcgcgaggcgcgggggcaaaaaaggactttttgaggaagcgaataacggcagcattttcttagatgaaatcggagagctgacccaaagcacccaggcaaagctgctcagagttctgcaggaaaaagaaattatcagagtcggcggcgcaaaagcgatttctgtcaatgtcagaattatcgcagcgacaaacgtcaacatcgaaaaggccatggcggaaggcgcgttccgcgaagacctgtattaccggattaaccgctatccgatctcaatcccgccgcttcggcagcgcaaagaagatattgaagcgctgagcattcggctcattgaaaaaatcaatcaggattacggccgcaatgtaaaggggctcacgccgaacgcgctgcgagctttatcagcctacagctggccgggaaacgtacgggagcttgaaaatgttctcggacgggcaatgatatttttagagccgcatatggaacggatcgaacagcagcatctgcctgttttcgaatcagagctgaatgacaaaaacggcacccaaagtgattttccggatgtagaaggggaaaagctgtctcaggctgttgaaaaatttgaagcgcacatcattcaaaaaacgcttgaaaagcataaattcaaccgaaccaaaacggcgaaagcgcttggtgtcagcattcggaatctgtactacaaaatggacaagtacggccttgcaaatgacggcatgcaataaattgcagagaaagcgcaaaccgctgcatgttttcttgaaaaaagccggaataaaccctttcgcatatttggcacagaacttgcattgttaaaagcggattcgcacaagaaaggtggtacaaaatgaagctgagagacctagttgaaaaagccgcggcaaaaaacgcaaaaaccattgcagtggcccacgcagcagataaagaagtgatccacgccgtcaaaatggcggcagaacacttgtcggcacgatttttactgacgggtgacagcggaaagctgaaagagcttctggcaaatgagccgaagttcaatgctgacatcatccacgccgattcaccagaagaatctgcggcaaaagcagtgcgcgcagtgcgtgaacaagaggcggacgttttaatgaaagggaatctcccgagctcaactcttctgaaatcggttttaaaccgccaggaagggcttcgttcaaaaagggtgttatcacatgtagccgtttttgaagtgccggactatgaccggctgatgtatgtgactgattcagcgctgaacattgccccgtctcttgaagagctcgggcatattctgcaaaatgcggttcatgtcgcacattcagtagggaaccctatgccgaaagccgcagtccttgcggctattgaaacggttaatccgaaaatggaggcgacgctgaacgcggctgcgatcgtccagatgtgcaatagaggacagattaccggctgcattgcggacggaccgcttgctttggataatgccgtatcccaagcggctgcgctgcaaaaagggatttccggaagcgtagcgggccaggcggatattctcttggttccttcaatcgaggccggaaatatgctttataagtcaatgatttattttgcgaaagcaaatgttgctgctgtcatcgccggtgcaaaagcgccgattgcattaacgagcagagcggataccgcagaaaataaactgtattcaattgcgcttgcgatttgcgcatcacaagaacagtaggaggaacgaacctatggaaatttttaaatatatggagacttatgattacgaacaattggtattctgccaagatgaacaatccggattaaaagcgatcatcgcgattcatgatacgacgctcggccctgcactcggcggaacaagaatgtggacatatgacagtgaggaagcggcgattgaagatgcactgagactcgcaaaaggcatgacttataaaaatgcggctgccggtttaaacttaggcggcgggaaaaccgttattatcggagacccgcgcaaagataaaaatgaagaaatgttccgcgcgttcggccgctacatccaaggcttaaacggaaggtatattacggcggaagacgtcggcaccaccgttgaagatatggacatcattcatgatgaaacagactatgtaaccggaatttctccggcattcggttcatcaggaaatccgtctccggttacggcgtacggcgtctacaaagggatgaaagccgcagcgaaagcggcgtttggcactgattcactggaaggtaaaacaattgccgtgcaaggcgtgggaaatgtggcttacaatctatgccgccaccttcacgaagaaggcgcttctttaatcgtaaccgatatcaataaagaatctgttaaacgtgccgttgaggacttcggcgcccgcgccgttgatcccggcgacatttactcacaggcgtgcgatatttatgccccgtgtgctctcggcgccgtcattaacgatgacacgattaaacagctgaaggcgaaagtcattgcgggggcggccaataaccagctgaaagaaacacgtcacggcgataccattcatgaaatgggaatcgtgtacgctccggattatgtcatcaatgcaggcggcgtcatcaatgtggccgatgagctttacggctacaacgctgagcgtgctttgaaaaaggttgagggcatctatgcaaacattgagcgggtgctcgatatttccgcgcgtgacggcattccgacatacttagcggccgaccgtctggctgaggaacgaattgagcgcatgcgccgttcaagaagccagtttctgcaaaacggccaaagtatattaagcagacgataggaatttgatctggaggtatgaaaatgttcgaacaggaaaaacgcattctcattctgaatccaggctcaacatcaacgaaaatcggtgtctttcacaatgaacgctgtatctttgaaaagacgctgcggcatcccgaagaagagctgaaagcatttaacggcattatcgaccaatacgaatttcgaaaaataagcattcttgagtctttgcacgaacagggcatcaacatttcaaagtttgatgccgtttgtgccaggggcggcctgctcagaccgattgagggcggcacatatgaagtgaatgacgccatgatcactgatttgaaaaacggctacaacggccagcatgcttctaatctgggcggaattattgccagggaaatagcagacggattaaatatccccgcgtatatcgtcgatccggtcgtggtggatgagatgactccgctcgctaaagtatcaggaatgcctgaaatcaagcggaaaagcatttttcatgctttgaaccaaaaagctgttgcccgtcatgcggcggcgtccctcggcaaacggtatgaacagatgaagatgatcgtcactcatatgggcggcggcatcacagtcggggtccatgattgcggacgggtgacggatgtcaacaacgggcttcacggagaagggcccttcagcccggagcgtgcgggaaccgttcctgcgggtgatttggtggagatgtgtttttccggcaagtattcaaaagccgatatgatgaaaaaacttgtcggcacgggcggactctccggctacctggggacaactgacgcggtgaaggtggaaaaacgcattcaggccggagatgagcatgcgaggctcatttatgacgccatggcttatcaagtagcaaaagaaatcggggcggcaagcgccgtattaaaaggaaaagtagacattatcgtcctgacgggcggattggcgtacgggaaaagtttcgtatccgccatcagatcgtacatagattggatttcggatgtactggtgtacccgggagaaaatgaactgcaatctctcgcgcaaggcgcgcttcgggttttagccggcgaggagcagtcaaagcaatatcagatcggcgaaggagtgaaaacaaatggcgactgaatatgatgtggtcattctgggcggcggcacgggcggttatgtagccgccatcagagcggcccagctcggcttaaaaacggccgttgtagaaaaagaaaagctcggcggaacatgcctgcataaaggatgtatcccgagtaaagcgctgttaagaagcgcggaagtgtaccgaaccgcaaaggaagcggcagcattcggcattgaaacggaaggtgtctccctccgctttgacagcgtgcaaaaacgaaagcagggaatcgttgaccggctggccggcggtgtcgcccacttgatgaaaaaggggaagattgatgtattcaacgggtacggacgtatgctcggcccttccatcttctcacctcttcccggtacggtttccgtcgaatacgcaaatggtgaagaaaacgacatgctgataccgaaacaattgattatcgcaaccggttcaaggccgaaaatgctgccgggtttagaagcagacggtacatatattctgacatcagatgaagcgcttgagcttgagcgtctgccccaatccatgttgatcgtcggcggcggtgtcatcggaattgaatgggcatccatgctgaacgatttcggcgtcaatatcactgtgattgaatatgcggaccgcattttgccgactgaagaccatgatatttcaagcgagatggaaaaactgttaacgaaaaaaggaattaagattgtaacgggtgcgaaagtgcttccggatacattggaaaaagcggatggcgtttcaattgccgctgaaaagaatggaaaaaaagaaacgtatcacgccgaacaaatgcttgtttccatcggccgccagccgaacattgaagggatcggtcttgaaaacacggacattgcagcggaaaacggttctatcatagtaaatgaagccggacagacgaaggaatcgcatatttatgcgatcggtgatgtcgtcggcggtctgcagcttgcgcatgtggcctcccgtgaaggcatcattgccgttgagcatatggcgggtcttaatccggctccgcttgatgccgctcttgtgccgaaatgcatttattcaaatccggaagcggcgagtgtcggtctgacagaagaagaagctgcccgaaaaggacatgaacttaagatcggaaagtttccgttcatggcaatcggaaaggctcttgtatacggagaaagcgatggctttgtcaaaatcgtcgccgaccggaatacagatgatattctcggtgttcatatgatcggcccgcacgtcaccgatatgatctctgaagcggggcttgccaaggtgctcgacgcgacgccttgggaaatcggccagtccatacatccgcatccgtcgctttcagaagcgattggggaagctgcgttagccgcagacggaaacgcgattcatttttaaaaggaaagaaggaggggtttgaatgactacaaaccgccatcaagcattagggctttctgacgaagaagccgttgaaatgtatagaaccatgctgttagccagaaaaatcgacgaaagaatgtggctcttaaaccgctcgggcaaaattccgttcgttatttcatgtcaagggcaggaagcggctcaagtaggcgcggcctatgccctaaaccgcgataccgactatgtgcttccgtactacagagatatgggggttgtgcttgcattcggtatgactgctaaggatttgatgatgtcgggttttgcgaaagcggctgatccgaactcaggcggaaggcagatgccgggccacttcgggcaaaaggaaaacagaatcgtaacgggctcatcccctgtgacgacgcaggttccccacgcggtcggaatcgcgcttgcgggacgcatggataaaaaggatatcgtctctttcgttacctttggagaaggttcttccaaccagggagattttcacgaaggggcaaactttgccgccgtgtataaattgccggtcattttcatgtgtgaaaataataagtatgccatttccgttccgtatgacaaacaggtggcgtgcgaaaatatttccgaccgggcggcaggctacggcatgccgggagtcacagttgacggaaacgacctgctggaagtttaccgggccgtgaaagaagcgcgcgaacgggcatctaaaggcgaaggtcctacattaatagaaacggtttcctaccggttgacgccgcattccagtgatgacgacgacagcagctacagagaacgcgaagaagtagaagaagcaaagaaacaggatccgcttcttttatacaaagcatacttgcaagaagccgggcttctaggtgaagaagaagaaaaggccatgctggatgacatcatggctatcgtaaacgaagcgacagacgaagcggagaaagcgccatacgcatctcctgaatcaacgcttgatcacgtttatgcgaagtagggaggaatacttatgtctgtaatgtcttatattgacagtattaatgcagctatgaaagaagaaatggaaagagatccgcgcgtttttgtcctcggggaagacgtcgggagaaaaggcggcgtatttaaagccacggcgggtctctatgaacagttcggagaagagcgggtgatggatacgccgcttgcggaatcagcgattgcgggtgtcggaatcggcgccgcgatgtacggcatgcgcccgattgccgagatgcagtttgccgatttcattctgcctgcggtcaaccaaatcatttcagaagcggccaaaatacgctaccgttcaaacaatgattggagctgtccgatggtcatcagagcgccttacgggggcggcgtgcacggcgcgttgtatcattcccaatctgtggaggccatttttgccaaccagccgggtcttaaaattgtcatgccttcaactccttatgacgcaaaagggctgttgaaagccgcagtccgtgacgaagatcccgtgctgtttttcgaacataagagggcgtaccgcctgattaaaggagaagtccctgctgatgattacgtccttccgatcggaaaggcggatgtaaaacgcgaaggcagcgacattactgtcattacgtacggattatgcgtccatttcgctctgcaggctgccgagcgtcttgaaaaagacggaatttccgcgcacgtattagacttgcgtacggtttatccgttagataaagaggctatcattgaagccgcgtctaaaacgggaaaagtattgctgatcacagaagatacgaaagaaggcggtattatgagcgaggtcgccgccattatttctgaaaactgcttatttgatttagacgcgccgatcaagcggcttgcaggccctgatgttccggcaatgccttatgcgccgacaatggaaaaatacttcatgatgaatcctgacaaagcggaagccgcgatgagagaattagcggagttttaaagacgtaaggaggtttttgacatggcgattgaacaaatggctatgcctcagctcggagagagcgtgacggaagggacgatcagcaaatggctggtatccccggtgatcaagtgaataaatatgaccccatcgcggaggtcatgacggataaagtgaatgcggaggtgccgtcttcttttaccggtacgattacagaacttgtaggagaagaaggccagactcttacagtcggcgagatcatctgcaaaattgaaacggaagaaacggaaaccgaagaggcgccgaagcgggaagaagagcagaataccccttcagacaccgatgcaaaccgtcaaggtaaagaccagtcaaataaagcgcgttattcgccggccgtgctcagattagcgggagaacacggcattcagcttgaagaagttgaaggaacgggcgcaggaggaagaattacgcgaaaagacattcaaaagatcattgattcgggaatgcagcagaagtcggaagcaccggcgccggctgccgttcaaacaacgcaacaagcgccgaaacaacagcaaaaacaagcgccggcgccagttctgtcagccggtgatattgaaattccggttacaggcgtcagaaaagccatcgccgccaatatgcataaaagcaaaacagaaattccgcacgcctggacgatgatggaagtcgacgtcacgaacatgacggcgtacagaaacagcataaaagactcatttaaacaaaaagaaggcttcaatttaacatttttcgctttctttgtaaaagcggcggcgcaggctctcaaagagttcccgcagatgaacagcatgtgggcgggagacaaaatcgtccaaaagaaagacatcaacatctccattgccgttgccacggaagattcgctgtttgttccggttattaagcatgctgatgaaaaaacgattaaaggcatagccagagaaataacggaccttgcgaaaaaagtgagaaacggaaaacttaccgcggaagatatgcagggcggcacatttaccgtcaataacacgggatctttcgggtcagttcaatctatgggcattatcaaccatccgcaggcggcgattcttcaggtagaatctatcgtcaaacgtccggttgtcatgaataacgggatgatcgcagtgcgtgatatggttaatctttgcctgtctttagatcacagagtgctcgacgggctcgtatgcggccgtttcctcggacgcgtcaaagaaatcttagaaaacattgacgaaaatacttcagtctattaaaaaaactccttttgcccgggcggcaaaaggagtttttttattttcattgtgaatcctcgggaacaagcatagtgagatgatgttttttcacttcgatcgtacaaggcgttgttccgtatacctcgccatctgtatccgcgtccatttcacgtccggtttcgatttcaatcctggaggcctgaatataggacagctcccctttgaaatcatcaaacgaaccctgctccatcgtcatcagctcccgcaacgcggcaaggcttgtgttgcggcagattaacacatcggctaagccgtcccggaggctcgcatcaggcaggggaactctgtttgtcccgatataatgcccgttcatgacaagcaccattacggcttcgtcttctttcacctcgccgtcaattgtcaatttgacaggaaacgggttcgcacttgtcatcgtccgcaaggcgctcgtgaagtagctgattttaccaagccatgctttttcagtttcattgatatggctcgatgcttcggtgatcaatccgatgccccagaagttcagaaaatagccgtcatccgttttacagacgtcaatcatccgtttatgtccggccgcgagcgcttcagcggccttttgaaggttttgcgggatgccgagcgcccgtgagaaatcgttgcacgttcctcccggcaaaatgccgacagcgggcctgttatcaagcttgctgatgctgttgatgcattgatgcacagtgccgtctccgcctaaaatatataaatggtcaactgaactgtcgaggttttcacaatactgacgggcatcgtcctgatgtttggtcggtttaatcaaaagttcgtcagctgactgggccaaaatggggacgaccgtgccgagcgttttatcaatctgtttttgaccggcgtttccgttataaattaatactgctttccgttggctcatacgactgctcctttatttcagacaatctctttaacaagtttcccgtttttaaaaggtcataaacttacatcaggtacataaaaggaacaaaaaacaatttggatatgagcggtgtcatttgccgatagtgaggttccttgctatcataagaaaagatgatcaaaaaggagaggtcccagttgaatatggattttaatttatttatgaatgatgtcgtgcgtcaagcccgccaggaaatcacggccgccgggtatacagagctgaaaaccgctgaggaagtggacgaagcgctttcgaaaaaaggaaccacactcgtcatggtcaactctgtgtgcggatgcgcaggcggtattgcacggcctgccgcataccattctgtacattacgataaacgcccggatcagcttgtgacggtatttgccggacaggataaagaagcgacagccaaagcgagagaatactttgaaggctatccgccgtcctctccgtcatttgccattttaaaagacgggaaaatcatgaaaatggtggaacgccatgaaattgaaggccatgagccgatggccgtcgtcacaaaactgcaggaagcatttgaagaatattgtgaagaagtataagtgaaagaaaaaccccggagccgagcgcttccggggttttttatatggaatctgtataaatataaatatttatacaccggcgttcagctgtcactaatcggaaaaacaatgactataataaacagagaaaggaaaatatatttttcaaaaatagtattgcatcacaattaaaaagtgtttaaaatacaagttaacgaataaatattcaattttaagagatcagtagatatgggggaaatgaatcatgaagaaatggctgttggtattagctgccgcatgtatcacctttgcgctgtccgcctgcggatcaggcaattcaggctcagagggcggaaagaataagctgattatgggtacatcggctgactataaaccatttgaatataaagacggcgatcagatcaccgggtttgacgttgatctggcaaaagctctgggcaaaaagaccggctatgacgttgaggtgcaggacatggacttcaacagcctgattacagccttgaagtccaagcaggtagatatgattttatctggaatgacacctacgccggaacggaaaaagcaagttgatttttctgatatttattatactgctaacaatatgattgttacgaaaaagggaagcagcattaaatccctgaatgatctgaaaggcaaaaccgtcggtgttcagctcggctccattcaagaggaaaaaggcaagaagctcgcttcgaaatacggttttcagctcgaagaccgcaaccggatctcagacttaacggaagagattaaatccgggcgttttgatgccgcgattatcgaagacatcgtagcacaaggctatttcagttcaaataacgatctgcagggctttgcgtcagcagatgcgaaatcagacgaatcgggctccgcgattgcgttccgcaaagacagtgatctgacagcgaagtttaacaaagcgctgaaagaaatggagaaaaacggagaaatcgaaaaactgaagaaaaaatggttcaccaacgagaaataaaaggaagctcaacttttcgttgagctttttatcttgaataaagacaaaggagatcacacgtatgaatttggatttctcagcgacaatcccccaaattccttttatattggaaggccttgcggtcacattaaaaattgtgctcgtttcagcggtcatcggtcttgtattaggaatcgtgctcagcttatttaaaatcagcacgatcagtccgctgaaatggattgcggatttttatacttcgatattccgcggcacgccgcttgtgctgcagctgatgatcatctatttcggtatgccgcagcttctcggctttcagatcgatcaattttgggcggcggtcaccgcattatcgctcaattcagccgcttacgtctctgaaattatcagagcgggaatcaacgcaattgacaaaggacaaaaagaggctgccgtcgctctcggcgtgccgtacggaaaaatgatgaaagatctgctgctgccgcaggcgtttaaaaacatttctccggctattattaacgaattaatcaccttgacgaaagaatcggcaatcgtcacggtaatcggtctcggcgatattatgagacgggcctaccagtccggcgccgcaacatacaactatttagaacctcttattgtggcgggcttaatctattacgtgctcgttttgatcttagcattcatcggaaaaggcgtagaaaggaagctgaaagccaatgattaaggtcgacaacctgtcaaaatcattcgggaaacatgaagtactgaaaaacatttcaacacagatcgaagaaggggaagtcgtcgccgtcatcggcccttccggttccggcaaatcaacgtttctgcgctgcttaaatctgctggaaaccccgagcggcggaacgattgccattaaagaaaacgaaatcaccgcagctaaaacgaataaactgaaagtgcgggaaaatatcggcatggtatttcagcattttcatctgtttcctcataaaacggtgcttgaaaatatcacatacgcgccggtcagcgtgaagaaagagtctaaaaaggatgcggaggaaaaggcgtgcgctctccttgaaaaagtcgggctgcttgacaaacggaacgactatccgaaccgtttgtcaggcggacagaagcagcgggtcgccatcgcgcgggcgcttgccatgaatcctgacatcatgctgtttgatgaaccgacctcggctcttgacccggaaatggtcaaagaagttcttgaggtgatgaaagagctcgcgcagacgggcatgacaatggtgatcgtaacgcacgaaatgggatttgccaaagaagtcgcagaccgcgtattatttatggatgaagggacgatcgtggaagacggtcagccggaagaattttttctttctccgaagtcaaaaagagcacaggactttttagaaaaaatattataaaatataactgtaagaaaagaagaagaatgctcttcttcttttttttgagaaagaaacaaacagaatggagcaagcaatgtttaaaatcggttaccggacactaaagaccgcacttggaacggcgctggccatttatttagcccagctgttgcatctgcaaaacttcgcatccgcaggaatcatcaccatattgtgcatccagattacacaaaagcggtcgcttcaggcctcgtgggcccgatttgccgcctgtttattggcgatcgtcttttcatatgtctttttcggactgatcggctattatccgtttgcgatcggaatattgctggtgctgttcattccgactacagtcgttttaaaaataaatgaagggatcgtcaccagctcagtaatcattcttcatttatatatgtccggcggcattacgatggcgtttatctggaatgagttccagctgatcaccgtaggtatcggcgtcgcgctgttaatgaatctgtatatgccgagcctcgacagaaaactcgcagcgtacaggaaaaaaatcgaggacaacttttccgtcatcttcgccgaaatcgaacggtatttgttaactggtgagcaagattggacagggaaggaaataccggagacgcatcagatgattcaagaggcgaaaaacctcgcctatcgggacgtgcagaatcatattttgcgccatgaaaatctctactatcattattttaagatgaggcagaaacaatttgaaatcattgaacggctgctgccgaagattacctctatttcaataacggtggagcagggaaaaataatcgcccatttcatccatgaattaagggaagccattcatcccggcaataccgctcataaatttttaaaaagacttgcagaaatgagaacggaatttgaagaaatgccgctcccggcaacgcgtgaggagtttgaagcgcgggcggctttgttccacctcctcggtgagatggaacaatatctcgtgattaaaagttatttcaaaggcatcaagctgtaaaaaacatatggatcaatcgcatgagtcctcctttcattggtcattctaatgaaaaaaggaggggagcccatgcgattttttttattgtcagccgtcctgctgctgtctccgctttggccgcttggcgcgaaccctttgccgggtgacccttatattatcgtcaataaagccacaaatgcgcttgctgttgtaaaggataaccgaatagaaggcatttatcaggtggcgacgggaaaaacggatgatttgacgcctgaaggagaatttacggtaacggtcaaagccgtcaatccgtattaccggaagaaaaatgtagagggaggcgcgccggaaaacccgctcggcgtccgctggatcggttttgatgcgaaaggcaccgacggcagaatatacggcattcacggaacaaacagagaagagctgatcggggggtttgtatcaaacggctgcatccgtatgaaaaaccgggatgtcatccgtattttccggattatccctcccggaacgaaagtattgattacaaaagaaaaccgctcattcgaggacattgcaatagagcggaaagccctcataaaaaagcaggaaacccccttgcaatgaggcgcctgcttttttactgcaaatacatcataatgcctgagaggagggttgaaagtataaatacgcccaaaatgacgatgacggcgcttttcataaatttttgagacattgtttcactccttaagattactgtctaccattttaacgtgttttgcttatatgaacaagccatatcctatgggggaaagcaggtggccgcgctatgaaaaaacttgatcatgtcggcattgccgtcagctctattgaagccgcgagaggattttacgaacggatgctcgggcttacgtatatgggagacgagctggtaaacggccaaaatgtgagagttgcttttttagaagcgggaggcacaaagcttgagctgattgagccgctgtcggacgcgtctcccgtcagctcttttttacagaaaagaggcgaagggctgcatcatttggcattccgctgcgccgatatgaaggaaacgatcaaggagcttgaatcatgccgcatgaccttgcttcatcatgaaccgcaaaacggagcgggcgggaagaagatcgcatttctctctccaaaagaggcgaacggcgtcctgattgagctttgtgaaacaattgaaaaaggagaaactcaagatgaacatgagtgatcatatcagacacttaaacgaaagacgttcctttttaacaaacggcggcggagcggaaaaaaataaaaaacagcacaaaaaaggcaagctgacggcaagagaaagaattgactatctattggacgaagacagtttttcagagctgcagccgtttgccaaaagccgcacgcccgggtgccagaatgctccgggagacggcgttgttaccggatacggcacaattgacggacggcccgtgtatttgtttgcccatgactttaccgtactcggcgggacgctcggcgagacgcatgcggaaaaaatcgcggcggtaatggatctggcggcgaaaaacaaaaacccgatcatcgggctgaacgactcaggtggtgcgagaattcaagagggtgtggtatcattaaatggatacggtcatatctttaggcgcaacgtcctttactcgggagtgattccgcaaatttctgtcattcttgggccgtgtgccggcggtgctgtttattcacccgctttgacggattttgtgattatggcggaacatacgtcgcacatgtttattacaggtccgaaagtcattgaacaggtgacgggtgaacagattgacgcggaaagtttaggcggtgcgggaatacataatgtgataagcggaaatgcccactattccgcacgaacggaaaaagaggcactttcggctgtgaaaaccctgctttcttatctcccgcacggcggacagacggcactacccgttaaaaaggaagacgccagaccgttattaaacaccctcgttcccgcggacagttcgaaaccttacgatgtgttacaggtaataaaagagctggcggatgacggaacgttttttgacattcagccgtattttgccaaaaacattgctgtcggttttctgaaactcggacggcgtacagtcggtgttgtcgcaaaccagccgaaacacttggcggggagcctcacgattgatgccgctgacaaagcgtcgagattcatccgtttttgcgacgcgtttcatattccgctattgacgatcgctgatgttccgggatttcttccgggccttcagcaggaacatgcgggaatcatccgtcacggagcaaaattgctgtatgcttttgccgaagcggcggtgccgaaagtgacgctcatcatcagaaaagcttacggaggcgcttatgtcgccatgaattcgaaagggctcggagcagatcttgtattcgcctggcccaatgcggaaatcgccgtgatgggagcggaaggcgcggcgtcgattttatacagcagagacatacaggcttctggggacccggagaaaacgaagcgcgaaaaaaaagccatatacgaaaaggaaaacgccggtccgtataaagcggctgcctgcggtatggtggatgatatcatccggccggaagactcgaggaaaaaattgattcaggcatttgacatgcttgcgcataaggaagaggaaagaccgaaaaaaaagcacggtaatataccgctttaaacggagggaactgaaaatggtaaacgaaaaacgtctgcttgaagaatttcttgaactcgttcaaattgattcagagacaaaacatgaagcggaaatcagcaaggtgctcaaacaaaaattcactgatttaggattgagcgtaaaagaagatgatacaaaagaagtgacggggcatggagccggcaacttaatctgtacgttaaagggcacaaaagatgcggatacgatttattttacatcccacatggacacggttgttccgggcaaaggcgttaagccgattgtggaagacggctatgtaaaatccgacggcacgacgattctcggcgctgatgataagacgggccttgccgcaatgtttgaagccattaaagtgctgaaagaacaaaacatcgagcacggcaccattgaattcattatcacggccggagaagaatcgggattagtcggggcaaaagcaatggatcgttcagacattaccgcgaaatacggttttgcgcttgattcagacggaaaagtcggcaacattattgtagccgcgccgacacaagcgaaagtgagagcaaccattttcgggaaaacggctcatgcgggtgtagaaccggaaaaaggcatctccgcgattacaatcgcatcaaaagcaatctctaaaatgccgctcggccgtattgataaagaaacaacggctaatatcggccgtttcgaaggcggcacgcaaaccaatatcgtctgcgaccaggttgatattctggctgaagcgcgttcattagtgcctgaaaaaatggaagcgcaagtgcagaaaatgaaagaagctttcgaatctgctgcagctgagatgggaggccgcgcggaagtggacatcgcggtcatgtatccgggtttcaaatatcaggacggcgatcaggttgtggaagtcgcgaaaaaagcggcggcaaaaatcggccgtccgagcgaacttcagacaagcggcggcggaagtgacgcaaacgtcattgccggccacggcattccgacagtcaacctgtcagtaggctatgaacaaatccatacgaaaaatgaaaaaatgccgattgaagagctcgtcaaaacggcagaaatggtcgttgccattatcgaaacagcggccaactaaaaacgaagcacccagttgattgggtgcttttttcattcttcatgatattaggcttaaagctttgcagatacaagaaaaaaccctgccggataggttccggcagggtttcagtattatgatttggcgggctccgcctgagccgcagcctgtttctttttatgatgcgtctgctgtaaaagtacgttctgcactgtcaaaaacagtccgcttgtaaaccagtaaagcggcagcgcagccggtacgttaagcgaaaaaacggtcatcatgacagggaaaataaagaccatgatttttgctgactgcatcgcggccggattttgagcagccggtgaatatttctcgtttaatttttgggaaatataagcctgtaagaaatacatggccccgcgcacagtgatacaagaatatcagaatgccctaagctgaaccacagaaatgagtgtgaagcaatttccggcgttgagcggatggcgtaataaaaaccgatcaaaatcgggaattgcaccagcatcggaagacatcccattgccatcggattcagattgtgctcacggtaaagcttcatcatttccatttgcagttctttttgtttttccgcatctttcgtttgtttcattttagcctgaatgctgtcgacctgcggtttgatcacagccattttttcctggaacacccgctgtttcttaaattggttcacaaacaaaggcaatacaacgatccggacgataatcgtcaccagaataatcgacagtccgtactcaccgtggaacaggcccgccaccccttttaaaagtgccgaaaacggctcgatcaggtaatcgtggaaaaaaccgatattcccgaggcctcccgtctgagtctgagatgtcgccgcaaaagccgagcggcctgtgcacagtacgataaaaaataatcccaatacgatccacttttgatatgttttagacaattatgtttcctcctttatatcttcacttgccgttataaaaggaggaagctgacatcttcatcatcattcgccggtgaattcatgcggatgactttacgtatccaagttgtaatgcgatgatatataataataagaaagtctgttcggttcagctgaacgactgcttgatgttcatctattcgtttcgttctccaatgctcgcctgcgcggcgctcacgcaaaagaaaagcgatgccgatcgcggtcagagcgggaagaataattgtgaaaaaatcgactaaaaataaaaagtcattcattgactcaagaatcattttatcacatccattcagctcttattttactacatatatataaggttgtctatgaaaggaaaggaggcgccgggagtggccggaaaagggagaattatatttcatatcgatatgaacagtttttatgcctccgtagaaatggcgtatgatccgtctttaagaggaaaacctatcgccgttgccggaaacgtgaaggaacggaaaggaatcatcgtcacctgcagctacgaagcgagagcgcggggcgtaaagaccaccatgccggtgtggcgggcaaaacgcctctgtccggaactcatcgtcgtgcctccgaattttgaccgctatcggagttcgtcaaaagaaatgttcagcattctgagggagtatacggatttagtcgagcctgtttctattgatgaaggatacatggatattacggacacaccgcacagacacagggcgtatgagacagccgcagacattcaggcgagactgcaaaaagagcttttgctcccgtcaagcatcggcatcgccccgaataaatttctcgctaaaatggcgtctgacatgaaaaaaccgctcggcatcaccattttaagaaaaagagagctgccggacgtcttatggcctcttccgatagaagagatgcacggtataggaacgaaaactgcggaaaaaataaaaacgctcggcatcaaaacgatcggtgatttggcaaaaggagatgaacatgcgctgaaaacgcttctcggcataaacggcccgaggctgaaggataaagcgaacggcatccatcctgcagaagtcaatcccgagcggatttatgaatttaaaagcgtcggcaactcatccaccctgtcgcatgattcggctgactgggatgaattaacgggcgtgtttgaccggcttgcgctgtctgtgagcgaacggctccagcgtaaggaggtcatggcctgccggctgttcatcatgattcggtatgcggattggaaaacggtcacaagaagcatgaccctcagcaatccggctgatcagaaaaaagacatcatggaagcggcgatggaactgtttgacaagcactggaaccaaaacccggtaaggcttctcggcatcaccgggacggaactggttgaaaaacagcaggcgtataaacagcttgatctgttttcattcaaggaggacgcaaaggatgagccgatttttcagatgatgaacgagctgaatgaaaagtacggccaaaacctgatcagaaaaggcgccgttataaaaaaagaagaaagcaaaacaaggggcacgagctttaacagagacttttttcaggatgaaaagaaaaggtgaataacttgaaaaaaggggttatgtatgataatttctttagtataaatatcattttattttaatttaaattttaaaatggttaaacgtttgaagaagggacgttagaatatgtcaaaacaacaaatcggagttatcggtcttgcggtaatgggtaaaaatctggctcttaacatcgaaagccggggattttctgtgtctgtatacaacagatcaagcagcaaaacggaagagtttttagaagaggcaaaaggtaaaaatgttgtcggtacatacagcattgaggagtttgtccagtctcttgaaacaccccgtaaaattttattaatggttaaagcgggaactgcaacggatgcgacgattcaatctcttcttcctcatctggaaaaagacgatattttgattgacggcggaaatacatactataaagatacacagcgccggaacaaagagcttgccgaaagcggcattcactttatcggaacgggtgtatcaggcggtgaagagggagcgctgaaagggccttctattatgccgggcggccaaaaggaagcgcacgaactcgtaaaaccgattttagaagccatttctgctaaagtggacggggaagcttgtacgacatacatcggcccggacggagcgggacactatgtgaaaatggtgcacaacggtatcgaatacggtgatatgcagctgatctctgagtcatatttcattttgaaacaggtgctcggattgtctgccgaagagcttcacgaagtattcgctgagtggaacaaaggagagcttgacagctatctgatcgaaatcacggctgatattttcactaaaaaagatgaagaaacgggcaaaccgctagttgacgtcatccttgataaagcaggccaaaaaggaacgggtaaatggacaagccaaagcgctcttgacttaggcgtgccgcttccgattatcactgaatctgtttttgcgcgtttcatttccgcaatgaaagaagagcgtgtgaaagcaagcggccttctgtccggaccagacgttaagccggtcactgaaaataaagaagagctgattgaagcggtcagaaaagcgctcttcatgagtaaaatctgttcttacgcacaaggcttcgctcaaatgaaagccgcgtctgaagaatataactgggatctgaaatacggtgaaatcgcgatgatcttccgcggcggctgtatcatccgcgcggcgttcctgcaaaagatcaaagacgcatatgaccgtgaaccggagcttgacaacctgctgttagacagctacttcaaaaacattgcagaaagctaccaaggcgctcttcgccaagtgatttcacttgccgtagcccaaggcgtgccggtaccttcgttctcaagcgcacttgcgtattacgacagctaccgtacggcagtgcttcctgcaaacttgattcaagcgcagcgtgattacttcggcgcgcatacgtatgaacgcacagataaagaaggcattttccatactgaatggatgaagtaatgaagaagcccccgcattgattgcgggggcttttctgatattaaaaaccgcgggccgtcatgaacggcgccgcggtttttaaattttttcttatatattccaccagtggagaccgtctttttcaagaagatcgtccgaagctttcggtcccattgaccctgcttcataattcggagaaagggttttgtcggctgcccacgtttcggaaatcgcatcgacgaaattccaggaaagcgccacttcgtcccaatgggcaaagtttgtcgcatcaccgagcagacagtcatggattaatttttcataggcttccggtgtgttcatttcatcactgcagttgctgcagtagtccagcttaatcggctgagcatgagcggctccgcctaattttttagcgttcagatatagtgtgatgccttcatccggctgaatatggatgacaagcaggttcggatttacattcgtttcattgccgtaataaaggttcatcggaatgtctttaaattgaacgacgattttcgttgatttttctttcatccgtttccctgttcggatataaaacggaacgccggcccagcggaagttatcgattaacagctttccggacacgaatgtttccgtattggaatccggtgctacattatgctcatctgtatagcttggtacagagtttccgtcaatcgttcccgcttggtattgtccgcggacgaagtagtcactcacttcgtttggagcgacagggcggagagctctcagcaccttcactttttcgctgcggatttcttccgtgttcagtttaatcggcggttccatcgccaagagagcgaccatttgcaaaatatggttttggaccatatcacggagtgcgcctgatttttcataatatctcgcgcggtcttcaacgccgagatcctcgcttgacgtaatctggatgtttgagatgtagcggttattccacagcggctcaaacagcgcattcgcaaaccggatgacttcgatattttgaaccatttgtttgcctaaataatggtcgatccggtaaatttgatcttccgtgaaagcttcgcgtatttctttgttaagctctttcgcactcggcaggtcatggccgaacggtttttcaatgacgagacgggaccagccatttgtcgctgtgacaccttcgtttttaagtgattttgcgatcgtgccgaaaaactcaggagccatcgccaagtaaaacattctgttgttcgggatttcatatgtatgttcaagctgatcaagcaggacattcagctcctgataggaacccggattcgttacatcaaacggatggtaataaaaatgagatgtgaaatcgtctatgtctttttgcccggcagaagaaacagacgttttaaccgtttcccggaggtcctcgtttgaccaaggtcttcttccaacacctacaactgcaaactcttcaccaatttgaccatttttatataaacggtgaatggatgggtaaagttttcgttttgccaaatcccctgtggcaccaaatattacaattactgcttttggtttgtcgtttgttttcacttagagtacctcactttatctgaagcatggtttaaaaccccgcatatttccttcattttaaatctaaaattcattgaaagcaaacatttcagcctgttttttgcggtttgcggaaaaaaattaatcaggccggagaaggcccgggtgaattcacattttcagtctgatcctgtatccttagtagtacaaagatctaggaggaagcattgtggaattattatttttagggacgggggccggcatgccggcaaagacgagaaacgtaacgtccgtcgcgctgaagcttcttgaagaaaggcgttccgtatggctgtttgattgcggagaagccactcagcatcagatattacatacaacaatcaaaccgaggaaaatagaaaagattttcatcacccaccttcacggcgaccatgtttacggtcttccgggtctgttggggagccgttcatttcagggcggtgaagaagagctgacgatttacgggccaaaaggcattaaagcctttatcgaaacaagcctgaacgtgacggcgactcatctgacgtatcctcttaccgtacatgaaatcgaagaggggacggtttttgaagatgagcacttcattgttaccgcagcatccgtcattcacggtgtggaagcgttcggctaccgggttcaggaaaaggatattcccggcgcattgcaggccggcagattgaaagaaatgaatatcccgcccggacccgtctatcagaaactcaaaaaaggcgaaacggtcacacttgacgatggcagaatcattaatgggcgggattttctggaatccccgaaaaaagggagaatcgtcgctttttccggggatacgagggcatcagagcgggtaacggagcttgcgcgcaatgcggatgtgcttgttcatgaagcgacgtttgccaaggaagatgcaaagctcgcacataattattatcacgcgacgacagaacaggctgcgcaaacggcaaaaaaagcaggcgccaaacagctgatcttaactcatatcagcgcaaggtatcagggtgaatcgccgatagagcgtctcgaacatgaggcgaaagcggtatttgaaaacagtaagatcgcatttgacttcatggaggtcactgtggagcggtcttaaaaaatagacgcttgacatttttttctgatgatatataataaaacgtaataattacgatttaaaaaaggggtgaaaatgatgcgtgtgaatgttacattggcctgtacagagacaggggacagaaattatatcacgacgaagaacaaacggacgaatccggaccggttagaaatgaaaaagtattcaccccggttgaaaaagtatactttgcatcgtgagaccaaatagatcacgataacaaaagccattgtgccgttgcacaatggcttttgttttcatcagtttaccgcctgataggcaggagcattcatttgctggcgcaccgcgcaccaaacatcataaatggcaaggtggacgatgtgcggttcatcgtgatgaatggcatgagaactgtttttggcctgaatccatccgctttgataagagacatcaagcatgcttctgtgcagtttcacccattgttcatgagcgtgctttaagcgctcatcccgctctcccgatgataaaatcaacagcggcatatcgccgaaatgaatctgctgatgctggatctgcctaaggctcgttaaaaattctgcgtgtgatccttccaatttgaactgtttcaaataggcggccttcatttcttcaggaagaagcggaagcactttcgtctcctgatcctcagaaaccggatcaagcagcaccatcccgagaatatcccggcggttccggctcgcccaaagtctgctgataatcgtgccgtatgaatgcgagacgacaaggtaaggaggcttgacgccggccttcagaagaagagcgcttaattcctgtaccatatggtccgccgttctcttgtttcggcttcgtccgcttttgccgattccggctctgtcatatgtgaaaaccccaaattcttcatctatgtcagcgagtaatgatgtccatgtttcagaagaagtgccgtagccggcttcaaagacgatcgtcacttcgccggcgcctttacggtgtttcgtataaaacggacacccgtcaatcagatatgtcctttccatccatgctgctttcattggagtcatctcctctaattggttctatagggaagacggagaagcttcggcaatcgtttctcgaaaaataaaaaaagagacagccgggatcgaaaaactccggctgtcacttcatcaccatgctctgtcgtattggaccggtgacggtatttcagtattcagctgcttcgctgcactccttgcaaagtgcggatcgcggagaagttctctcgcgacaaaaataaggtcagcgcggttgttgtgcagaatttcttcggccattgttcccgtcgttatcaaaccgacggcgcctgttgcaatttcggcctgttcacggattttctccgcgaagctcacttggtagccggggaagacgttaatatcagcttgaacgagtgcgcctgagctgcaatcaatgaggtcgactccctgttctttcatccacttcgcaaaaccgatatgatccgcaatgtccagccctttgtctgtataatccgatgcagaaatacggacaaataacgggccgtcccagacttccttgacggcttcaatggtctcgcctaagaagcggtagcgattttcatgtgagcctccgtattcgtctgtacggtgattggacagaggggacaaaaattcgtgcattaagtagccgtgtgcggcatgaagttcaatgatgtcaaagccggcttctttcgcgcgcgccgctgcctgtttgaattcctgaatggtttctttaatttgttctgtcgtcatttcagccggtgttttggactgctcatcgaacggaatggctgacggagcgtaaatgtctccctcaagctcagctttacgtccggcgtgcgcaagctgaatgccgattttagatccttgcgctttcacttgttccgtcagtttggcaaaaccttcgatatgatcatcgctccagatgcccaaatcctgatcggaaatgcgcccctgaggattaacggctgtcgcttccacgataatcaggccgacctgtccgattgcacgcgatatgtagtgcgccatatgaaaaggctgcagttttccgtccttctcatgtgaggaatacatacacatcggtgccataacaatacggtttttgatcgttacatctttaacggtccatggtgtgaataattttctcgccatttatttcgcctcccggaatgtttttcgacattgattataacaactcatgatcattcagtcatataaactgctcacaactgaacagatcgttcttattgttctggacgggcatttttttatacacagcgtggccgtatcttcataacaggcatttacagccgatcatatagcaaatatagatgagaaacgcaccgatgactgcgtggcctcctttgatccagtttgtcaggatgaaaatactgctgatgaagatcactgcgccgaaggcaccgaatattccgtttttttgagcggctctgaaatcgtcggggctcatatttttcagctgcaagtgaatattcagtaacgacatgatcggcagcaatgtgataacgcctgataaaaataagtatttcgacttgcttaaatacgcggcggccaccataacggtgccgccgataaaaaattgaatgagaaaactcatgctgaaacgctcaccttctgtttgttatcaagtataatgatggagacattgccattttatttttgattgatgtataagtaaactaaatataactaatgcattggataataaagaatgatatctgggagatgaagccgattggatttaaagaagcatttagcctttattaaaacggtagaaagcggcagcctgacccaagccgctgccatattgaattacacacagccgaacatcagccaaatgatcagtaaattagaggaagagtacggttttccgcttttgatcagacagcggcatggagtgaggcccaccgcaaatggcttgaaagtgttacatattatgaaggaaattcaaaaaaactatgaaaaactgtctcaaaccgttgataatattaatgggttagaaagaggggaagtccggctcggcactgttacgagcgtggcggtaaaatggctgccgaaaattttgagggaatttaatgagctgtatccttctattaaggtgcatttatttgatggaaattctactgagctggaacaatggctgaaagatgaccggattgatgcggcgattgggacatcccacagcgagaagtggcatttttacccgttggccgaggacccgattgtagcggtgatgagcccgcagcatgaattggcgcaatatgaaacggttccgttacatgtcatggagtccgtcaaatgtatcgtgccttatccggagacacattttgatgtgctgaaagtgttaaaggaagaaaagatcactccgcgggttgcttatcaaatcagaggggatgaagcgattattgcaatggtgcggaataatctggggatcagcatcttgccgcagcttttggtgaatgatggtgatgtgctcatcaaacggttcgaccggtatgtctccaggcagctcggcattttgacagctcgtgcaaaggagacgcagacaccttctgtccagaaactgattcaatgcatacaagaatgggttgcggtccatcaggcttctgcctgaagaagcctgatatgcgtttaagccggttcaggataatagaccagcaataaatatgtcatcggttccgaggaatgaaaataactgtgcggcatcgcccgaagtcagcacatgcttttcgtcatgaagctcaaccgtcaattcaccgctcttgattaaaatgattcccctaaatgtgattttgtctcataggcgcagcccggcttcaggtcaactatgccttgaaaacaaaaatttgaccgtgacggtggtgagcggggttattttgatgtcgggctttcgtctgtttatataaaaagggcatcaacggcacatgctgttgatgctttttttgaaatgctagggtttggagagcacttcaattccgacgttgaccattttgtccagccccataaaagacaggcagattttggcgcgtctttttcttttatcgatttttttaataatgccttccattcctttaagaggccctgaggcaacggttacttttgaattttcaatatagacttttgaataatctacagtgtctccttctccgatcagcctgataatagggaggatttcttcatccttaattgtcgtgaaataggttttgcgctctttggaataatatgctccgttattcacgattctgcatgaaatggggagttctttgattttatgaaatgtccgctctgtcatctttgttttaaacagaacatatcccggaaacatctttttgagtgcctcgtatttaattccggcttttcgttctgtgacttttttcttgggtatgattgagtagagagcctgctcatcaaactgcagacgcagaaatttttgaactgcttcttcttttcccgactctacaaaaagtgcgtaccatttcatgactggatcctccttagaataataagaaattattatacaaagaaagtatttaatggatagtatttaaagtgattaaaaatttttctaattcgtcttttttttacataatatatgaaaatgaaaaataagtatagacccaattgacagagaggcgatgaattttctttgacatgaaaagggttcagggaattatctgacatttatcccgaaacaattatgccgactgtccaccgaatataaaactgtggaataaatgtcagaaaataacgaaataaagccttgacattattatctataaattgatattattctctttaaatagcaactatttgttaaatttattaaattaaagtaaagcacctattaaatttcaatcgctgtttcggcacgttgaagaggaaatagggattataaaaatgattgcagtgtatatatctacatatacatgataagggagaagtgtgccgtcatggctgttttcgggcatattggcactgcagcttgtcatgcgaaacattcagtaaacaagcaagatgttttaatataaattatgttagaaaaggaaaacacaatgcgtttgcgatttttaaacctgtgctgaatcgcaaacgcgtttgtgtttttatttttatggcggtgtttacaccagtcaatatatgaaataagagacgtttttgtatggagaaccacatgtgatgtacaaaattggcgatggggaaaggatgaggataagatgcttacgtttgtgttcccggggcagggttctcaatttaaaggaatgggagccgggctgtttgatgaatttcaagatctgacacgtcaggctgatgacatattaggctactctatagaagaattgtgcctggaggatccgaatcatcagctggggaaaacgcaatttacccagccggcgttatatacggtaagtgcactcagttatttaaagaagattaaagagtccggcagagagcccgattacgccgcagggcacagtttaggagaatataatgcgttatttgcggccggctgctttgattttaagaccggtttgcagcttgtgaaaaaaagaggggagctcatgagcaaggcagctcccggaggcatggcggcggttttggggtttacggctgaacaagtaaaagaggttctatccgattatcatctgaccggcattgatatcgctaaccacaattcaccttcgcaaattgtgatcgccggaacgaaacaagacattcaaaaagcgggccccgcctttgaaaaagccggcgtgagaatgtatcttcctttaaatgtgagcggcgccttccattcccgctatatgaaagatgctgaaaaagagttcgcggattatttagaagaaacggcgtttttgcctcttcgttttccggtgatctcaaatcttcatgccgcaccttataagaatgatgaaatcaaaacaaatctgactttgcaaatgaccaatcaggtaaagtggacggacacgatacgccgtctgataggacttgaaaataatgaaattgcagaagtcgggcccggggaagtgctgacaaaactgacgaggcagattaaaaaagatgccgtcccattacctatgccgaaagaagagtctgatactgctgatgttaaagcatcggcagctgattcccaaaaaacggcgggaatgagattagggaacgaagattttaaaaaagattataacatccaatatgcttacatgacgggctccatgtacaggggaattgcttcggaacagatggtcattaaagcggcaaaagcgggaatgctgggctttttcggaacgggcggattgagtatcgaacggatcggacaggccatcggaaccatccggtctgcactgcggcaaggggaaacattcggaatgaatcttcttcatcatatgatgtcacctgacaaggaagtcagaatgatagatttatatttaaaaaacggcattcaccttattgaagcatcggcatttatgggcataaccccggctctcgtgatatacagggcaaagggattaagcaggaatcatgacggatcggtgtcagtccaaaacagaatcatcgcgaaagtatcccggcctgaagtcgctgaggcctttctgaatccggctccggctcatgtgctggaaagacttgtgtctgacaatcggctgacagccggggaagcggcgcttgcaaaagaaattccgatggctgatgacatttgcgttgaagcggattcaggagggcataccgaccaagggattccgtatacattaatgcctgccatgatcagactcagagaccgcatgatggagaagcacggttatgcgaaaaaagtaagaatcggcgcagcgggcggcatcggcactccggaagcggctgctgccgcgtttctgctcggcgccgaatttatcggaaccggttctattaatcaatgcacggtcgaagccgggacaagtgattcagtgaaagatctgcttcaggaagcgaacgtgcaggatacgtcatacgctcccgcgggagatatgtttgaagcgggagcaagggtgcaggtgctgaaaaaaggcctgtttttcccggcaagagccaataaactctttgacttgtacagacaatacaattctttagatgaaatagatgaaaaaacgaaaacattaattgaagataagtatttccagcgcagttttgaggaagtgtatgagcagttgaaacgtgataaatctcctgaacagatcgccaaagccgaacagaatccgaaacacaaaatggcgatggtatttaaatggtatttttcccatacgacgaggctcgctctggaaggaaaaagcgaaagtaaaatagattaccaaattcattgcggccctgcgctcggcgcgtttaatcaatgggtgaaaggaacccctcttgaaaattggagaaacaggcatgtcgacttgatcggcaaacagctcatggaagaaacagccggccttcttgcgcaaaggctggtatcgattacaggctgagtatgaccagacattacattttttctgcggaggactaccatgctgattgaaaatcatgaattaacgatgagccatgtcggattagggaatttgaatgagtacgcgctgctgctgttattcggcaatgcacacagtcaccatttaacggacggaacgggattccggcctgatcagatggccgatcaccaagggctgattttgtatccggcttattttatgacacatctcaaagttccttcagataagcctcttgatcagtaccgattatgggacgaggtttccgtcggagtcgatatctcccggtttggagaaaccatattagaatctgattatttgttcgggccgaaaggagcggtcagctctgataaaagcgagtgggaccggggacggtttccttctatgaaagccaatagtttaattgtcgttgacgtcacacaaacagaaggttcgacgcgcaaagtctcagcgccgaaggctgaatgtattgcggaactttctaagctagccaagccgccttacgcgctgatgcggtcaaagaaagtcagaacggacgctttcggtatgaagccgggaaacctcaaaacagcggaccccgtttcatatcgggttcctgttgatcaggatgctgcgccggggcatgccatggtgtttgcgaaattcagcaagataatggatgcggcggaatttgaatggatgacgcgccggtcgaagccgggttttccggtttcaatcgcgcggcatttatttttgcttgaaagagagacgtattattacggaaattgttttgcagatgaagagcttgatatttatatgacgggacacattgaagaatgcgatcccgactttcacggtgagtccctcggtatgatctcagtggcgaaaatcagctatcagattgaagtctatatgaaaaggaatcatacattgctggccatttccaaggtggataagctgctggcggtgccgacctcttcacaagatcatattccggattataaacgggtcatcagaagtttataaaatgaagaatggagctgaaagcaaatggaacaaaccaaggaaatgaagcagatcatcgctcaaattattcaggatattcaagaacagcagtcatatcgggccgtcgaagcgggagatgatgtgagagtcatagaggatctgggcttctcatcactggatatcgctcaattagtcgcacagatggagatggaaaccggagtggatcctttttcccaaggagaaacgatttccagcattacaaccgtcggcagcatttgtgatatttatcaaaaatacatggacagtgctcaatcatgaaaacagaaagcaggggagatatcagctgggtgactgataagcttagggaaacgcaggacagtgagtttctcatttttaaagggcagacttttacgtatgatgatttgctgacacgaatcagcttttttcagaaagaacttgaacaaaacggaatacgtgaaggagaatgtgtggcgcttatcggggattattccccgaacgccatttttttgctgatggcgcttttgttaaaccgaaatatcgttgtccctctcagcaatgaatcaagggaaaagcatctcgatatgtttgaagacgcgaaagtgaatcaaatcattgaaataaatgaaaatgacagctggacgcttcgtgaaggttctgaaagcgcctctcaccctctgcttgatgacctgcgcgagaaaggggagtcaggcattattattttcacatcgggaacctccggcaaaagcaaagcatccgtgttaagcgccggccggctgcttgaaaaatacaaaacggcgaagagaaaaccgctgcgtacgctcatttttctgaaattggatcatataggcggcattaatacgctgtttgcgattctgtttaacgggggaacgatcgtcacatcagacagcagaacgccggagtccgtttatcaggcggtcgacaaatatgctgtccaagtgctccccgccacccctacttttttaaacatgctgctgatgtccaaggcggatgccggctataacctgtcttcactccagctgatcacttacggcacagaaccgatgccccaatcaacgctgcgcggcattcaccggctgtttccggatgtacggctgaaacaaacatacggattaactgaactgggtatattctcaacgaaatcaaaagacagccaatccacttggatgaaagtaggcggtgccggaacagagaccaaaattaccggaggcacgctttgggtccgttctgagtcggcgatgctcggctatttaaacgcaccctcacctttcgatgaagacggctggtacgacaccggtgaccaggtggaaacagacggcgaatatataagaattctcggaagaaagagtgaaatcattaatgtgggcggagagaaagtgtttccggcagaggtggaaagcgtctttctggagatacctaatgtccgggatgttctcataacgggccgaaaaaatccgattacaggcgagattgtcgcggcagaggccgtacttgaaaaagaggaagatatcaaatctttcagaaagcgggccgtagctcattgcagacagaagctgcagccatatcagataccgcagatcatctctgttacagatcggaaactgtctaatgaccgatttaaaaaaataagaaacgtataaaacaggaggcaaatatgaataacggaaaagtagcggtcgtcagcggaggtagccgggggctcggaaaagcgattgtacaggcgcttttggatgagaattacaaagtagccgctttcagccgcagtgaatctgattttattaacacattgagagagagtgaaaagtaccgtgaccgcttttattgggaagcggcggatgcggcggatgatgccgccatgaaacagtttgttcttcaagtgtaccgcaagttttccagaatagacggcttggtcaataacgccggtttgaaccttgatcagctgctgcccctgaccaatgatgaagacattgaccgcatcctcaatctgaatatcggttcagtcatcaagctgacccgaaacgtttcccgggtcatgctgaaacaaaattccggatcaatcgttaacataagctccattatcggttcaagaggatttaaaggcacttcagtctacagcgcatccaaagcggctcttgacggcttgacgcgaagcctggccagggagctcgggtccaaaggaatccgtgtcaattcacttgcgcccggttttgtggacaccgatatgacgaaaaatatgccggaaaaacaaaaatcgcagattatcagaaggacgccgatggggcgtttaggcgaaacagacgatatgaccggactcgttcgttttctgctttctcctgaatcgtcctttatgaccggacagacaatggcaatagacggcggattaacttgttaaagcacagaaaaattcttttgtacaagggatggtatcctcatgaaatgtattaacgaatttttaagaacggtaatagcggaaaagctgggtgccgaggtgaccgaagcagaagataaaaccgctttttttactcttggcgtgacgtctctcatcagtgaagaaatcatgaccatattgcataaagaatttaccggcctttctgaaacgctgctgtttgaatatccgaacattgagaaattgagtgagtttttaagtgcgcagaaacgaaatcccgaaagcgttcttgaattcaaagaaacggagcctgatacgggaagccggcaggaagaagaagtgcttcctgtacaggcggctgaaaaggtgcctgaaccgggaacggacaggagttctgatattgcggttatcggaatgagcgggatgtttccgaaagcggaaaaccagcatgatttttgggacaatttaatggaaaataaagattgtgtctccgaaatccctgaggacagatgggacagctcttattactcggaagagaaaacggcaaaatacgcgtcatacagtaaatggggaggttttattgatcgtccggatcgatttgacccgctgtttttttctgtttccccgtgggaagctgatttaatggaccctcagcaaaaattgtatgtcacgtgctgctgggaagcgatggaggatgccggttacgggaacccggcggcgaggccgacggatcaaatcggtgtattcgccggagtgacctggaatgaatattcattaattgcacacgaagaaggtttcctcaaagatcagtataaaggccccggctccttatattggggcattccgaaccgggtttcttattttcttgatctccatgggccgagcatcgctgttgatacggcgtgttcttcatcgcttgtcgccgtccatcaggcttgtcaggccattatgtcgggcgactgtgaaatggcgcttgccggaggcgtcaacctcagcttacatccgcaaaaatacatgtttttaagccaatcgcattttctgtcttctgaaggaaaatgccgcagcttcggtgaaggcggagacggttacgtgcccggtgaaggcgcgggagccgttttgttaaaaccattgaaaaaagcgattgcggacaacgaccacatctacggtgtcattaaggggtccgccactaatcacggcggcaaaacgaccgggtatacggtgccgaatccggaagcgcaccgggacctgattttatccgctataaacagagccgcggtaagtccggcggatatcagctacattgaagctcacggtaccggcacggcactcggcgatccgattgagatacgcggtctgtctatggcatttgagaaacagaccgatgagaaaaatgactgcggaatcggctcggtgaaatccaatatcggacatttggaagcggctgcagggatcgccggtttaatcaaggtgcttttaagcatgaaacatgaaacgcttcccgccagtctgcacgccgaggaactgaaccgcaagatttctttttctgattcgccattttatgtcgtccgaaacaatcggccgtggccggctgaaggagataaaccgagaatcgccgcaatcagttcattcggcgcaggaggctctaatgcccatctgatcgtaggtgcttatcagccaaaacggcaagcggacgggaatactgagcaaaaaccgcatgccgtcgtactaagcgcacattccgaacagcagctgaaagaatatgccggaaaattgagctcctttcttgcccgattggaaaactcgccttctgccggcggatacagcctggaaaatatcgctgccaccctattgtcaggcagagagcctttctccttccggcttgctgtcattgcgtcatcccttcccgagctgaaacagcgattggacggctttgtgagcgggcacagcggcggcaggcatatttacttcggaaaagcgtcacccggacggccggacgtttcaggccaatccgtttcagatcctgaaaaatttgccgcgctgtgggtcaaaggccttcaaggtttcaaaaagccggagacgccgtatcagaaagttccgcttcctacgtatccgtttttaaaggaaacgtcctggctgaccgaccaaaaaaagcggtatacgaaaaagccccaatctgtcaaaaggcgtgaagcgctgcatccgctgcttgatgagaatgtttcatccgcccggaaagggacgtttcaaaagatattttccaaggatgaatatttctttaaagatcatttagtgaacgaaaaatatgtgctccccggagtctgtcatcttgaaatggcggcatacggcgcggcattgtggggagaacgcccggtcgtctctcttcaaaatgtgtggtatatggagccgattgtgacagggacagacccaagatccgtcatgatagagtttgaagcggaaaaagagcgtataagctatgtcattaaggaaaaaggagcggacggcactctcttttcgcaaggagaagtgatttgtaaagaaaatggagcgtcgtttgaggccccggtctttcagcttccggcgccatttacgcagagaacggagccgaaagacatctatcactcgttctctgaggcgggaatcgtgcaaaaggacagttttcaggtcatccgcgaattctcttatacagaaaggaaagcactggccaaattaacgctcccgtcacacttggaagcggattttaaacagtacatcctgcatccgtccttactggatggcgctgttcaaactgcaatggcgcatgtgctgcaatttcaaaaagagcctgcgcttatcgtaccgttttccttcggagaaatacagctgcttaaaccgttagcgaaaaccgtatttgtgcatgcggaggtaaaagcggcctccgttcaccaatttgatctgcatatttgtgatgagcgcggtgtgctgctggcggcagtgaaagattttatcataaaagaggtgcaggaaagcgccgggtttaaccaaaaagccggcgtcatgccgaagaaaagccgtgaaacggaattgcttatgacaccggtttggaacaccgtcaccattccggaaaccggcatgtctttcatgcgtgaagaaaaaataatcgtcatcgggggcgggccggattttcagcaggctttgaaagagatgtattccgatgtccgttttccggacatcacttctttggacagcgcggaacaaatagctgaaacactgaaagcgcaaggctcttttcaacacatgatatgggcggcgccggatcatccgattccatccgtttatgatgcggatacggccgacggacaggagcacggggtcatgcagcttttccggctggtaaaatcgcttctgcttctgaattttgacacggaacaactatcattgacaatctgcacgtttcaagcacagccgattcatgaacatgatgaggtcaatccgagtcatgcaagcatacacggattagcgggggcgctcgcaaaagaatacagcaattggagcatccggcttcttgatttggaatctcaaaggggagaccggcatcttcccgatatcttctctttaccggcggaccccgagggaaatccgtgggtctttcgtgcaggtcagtggcaccgccagcaattggccgtctgccagcctcatgcaggtgagccttcattataccggcacggcggggtttatgtgattatcggcggagcaggcggaataggagaagtatggactgaatatatgattcagacctatcaggcgaaaattgtctggatcgggagacggaaaaaagatacacagattgaaagaaagctgaaaagacttgcggctttaggtcccgcaccgcaatatttcagcgcggatgctgcggattatgattctctcaagcgggcgtatgacaccattgtgaaggaacatggaaaggtgcgcggaatcattcattccgccatcgtgttatcagaccggagttttgccaatatggaagaggaccagttccgcgcttcactttctgcaaaaactgatgtcagcttgcagattgcccgggtagctgaaggggaaccgctggatttcttgctgtttttctcttcgatgatgtcgtttcaaaaagcgccgggacagagcaattatgccgccgggtgcacgtttaaagacgcttttgctaagcggatctcacaaaaagcgccgtatgccgtaaaggttgtcaattggggcttttggggaagtgtcggcgttgtcgcttcagaacaataccggaaacggatggagcgggacggaatcgcttctattgaggcgcccgaagcgatgaaaacgctggaaaccctgctttcgggaccttatgaccagctggcgctgatcaaaacgacagatccggtttttatgaaagatgatctgaaagaacaagtaacggtttatccggaaaagattccttccgcactcggacaattagcggttaacatcacgcagaatgacgaagctgagcgggtaaaagcatcaaatgtcatgagctgcatgagagagatggaatccctcattgaaaaaatacttgtatcaaccctttatgagatgggcgcaaggcttgatgagactttgccgttatttcaatcggctgccggcataacggaacaatacagcagatggctgaaagagagctttgtcttcctgactgaattagcgcttgctccggaaaaaacggatctaggggaggtgtgggaggaatgggagcggaaaaaagagacttggctgcgccggaaagacatgagggcgcatgtcagattggcagaagagacattgcgtgtgcttccagacattttaaccggtaagcttccggcaacggaagtgatgttccctgactcctccttccgtcttgtggaaggcatttaccgcaataatatcatttctgattttttcaatgacaagcttgctgacacattgattgcagttttgcgggagcgtctggaaaaagacccgcaggcgaaaatccgcattttagaaatcggagccggaacgggcgggacgagcgccgcggtcatgagaaaattgaaaccgtatgaagcgcatattgccgaatattgtttcacagatatttctaaagtatttcttttacatgcagaagacatattcggtccggaatatccttatgtcacttataaaatattcaacgctgagcagccggtatcaacagaagcgccggacatcggcacgtatgacgcagtgatcgcgaccaatgtgcttcatgcgacaaaaaatatccgctctacgctgcgccatgcgaaagcaatgctgcaaaaaaacggccagctgtttataaatgagatcaacagccgcaccgtattcaaccatgtgacgttcggccttcttgaaggctggtggctgtatgaggatcatgatttacggattccgggctgtccgggggttgagccggccggctggtcggaagcgctttcacttgaagggttcgtccatcctctgtttccggctgaagccgcacacgacttaggccagcagattatagcggctgaaagtgacggaacggtcaggcttgccctcccgcaggcgtcagaagaaaaaccggagcgccgtccgtatgacgcagatggtctttcggatgatacattgcatttcagcttgagagaaaaaagcgttgaactgatgaagaaggtaatcggtgaagcgcttaaagtgccggcgcatcgtcttttatcccatgaacctttaaccgcatacggattggattccatactggtcgtcagactgaccaacgcgttaaaagacgtcttcggttctgtcagcagcactttgttttttgaatatcaaaccattgatgagcttgctgattactttctgtcttcccgtaaagaagcgctcgagcggcaattcgggaatggacgggctcattccgaaaacgccggacggatgcaggctcccgcagaaagcgccgcgccgattccaaacgtaagggaacggggcatcacatatctgacggaattaataggaaaaacgctaaagattccgagcaggagaatggatccgtcggtttccttaaccgcatacggtttggattctattctggtcgtcaggctcacaaatgcttttcgtaacgtgtttgaccaaatgaccagcaccctcttttttgaatatcagacgatagaagaaatcgcggattacctgcttctttctcagcggagagcatttatgaaagcgatgggtgtgcgtgaggagcagctgtctgatcacacagataacctgaatgtaattcctcaaaacgaggaagaaagcaggacaaacggagatccctatatccaggatatcgctgtcatcggtctgtcaggccggtatccgggcgccgatcacgttgatgagctgtgggaaaatgtaaaagccggcaggcattctattacagaagtgccgaaagatcgctgggactggaaaacgttttataacgaggaacgcggaaaatgggggtccatttattcaaaatggggcggtttcctcgatgacattgataaatttgatccgctgtttttccgtatatctcccgcggaagctgaaaggatggatccgcaggaaaggttgtttctgcagactgcttattcaagcattgaagatgcggggtacaccccggccacgctttgtgacagccggaaaatcggagtctttgtcggtgtgatgaacagcaattacccgacagttcccagcgactggtctatcgcaaacagagtatcgtttttgttcaattttcaagggccgagtatggctgtggatacagcctgttcttcttctttaacagctgtccatctcgctgcagaaagcctgcggagcggaatgagtgaaacagcgattgccggcggagtcaatcttatcgttgatccggctcactatgagcggctgtccgctttttcaatgctgtctcccggtgataaatgcaaatctttcggagacagggcggacggttttgttgacggtgaaggagtaggggcgattgtgttaaagccgcttgctcaagcggagaaagacggcgatcatatttacggcgttatcaaaggaagcatgctgaacgcagcaggcaggacaaacgcttatatggtgccgaatccgaaagcgcagtttgatctgatcgcagagacgttgaaacggacagacattcacccgagaacggtcagttacttggaagcccacggaacgggcactgcgctcggtgatccgattgaaatcgacgggttaacgaaagcttttcgcctgacaacagaagaccggcagttttgttccatcggttcaattaaatcaaatatcggacatttagaaagcgctgccgggattgcgggaatcaccaaactgcttctccaattgaaacataagaggattgccccttcattgcatgcggcggaattgaatccgaatattgagtttgagcacactccgtttttcgtacagcaaaaagaaacggaatggaaacgacctgtcttgaatatcacgggtgaaatgaaggaatatccgagaattgccggtatttcctcttttggagcaggaggggcaaacgcgcatatcatcattcaggaatatgtgccgtctgacagcctgaaaccaagggaaaacgcgtctgtttctccgcaaaaaccggctgttattattttatcagcgcgaaatgagcagcaattgacagagcgcgcccgccagcttctggatgatgtcataagaaaaaaacgttctgacggggatttggccaaaatcgcttacacgcttcaggcgggaagagaaccgatggctgagcggcttgcatttacggccgagtcgatagaagaactgaaaatgaagcttatgagtttctcaaacgatcatatcgaacatgctcatatctggcggggcaggacagccaaacatcattcattggcggcttcgctcacttctgatgaagatatggcgcttaccataaatgcctggctgaaaaaagggaaatacggaaagctgcttgacctttgggttaaaggacttgacgtcgattggtcagctctttatcagcgcaacccgggccgcatcagtctcccggcttatccttttgccaaagaccgatattgggtcacaaaagctgatgtgtcacttgacaaaacaggctcagcggaaagtgagaaagcagccagacttcacccgctgctccacgcgaatacatcgacctttaccgcccagcgctttacttctgttttttcagggcgtgaaccgttttttgccgatcacatcgtcaatggaaaaccggtgcttccgggcgcggctgctttagaaatggcccgggccgccgttacacttgccgctgagggcttgccgggcgggaaagcgggtgtccggctcaaacagatcgtttggctccgtccggtgacggcgctttctgaaggcgtgacgcttcatgtaaagcttcagccggaagaaaacggagacatcgcttttgaagcgtatgccgaaggagaagagccgcttgtctttttccagggaaaggccgtgctcgaagagacggagcgtgctccggtactcgatgtggaggcggttcaggcgcgctgcggcggccggcgcatgtcaaaggctgagtgctatgaagcattcgacagtctcggcatcacctacggaccgtctcatcaggcgcttgacgccgtctatgccggaagcggagaagtgctcgcgaagctcactcttccgccgtacgcccgcgaagaaaaggagccgttcatcctgcatccgagcatgctggacgccgccctccaggcttctatcggtctcgtgcactcagacggttccgcgtccggacggccgtttctgccgtttgccctccaagatatgcaggtgttttctgcgtgccgggagacgatgtgggcggtgctttcctcagcggacggcgcctatcatattgagctgtgtgatgaaaacggcgaggtatgtgtccgattgacggggctcaccgcccgttttctggaagaggaaacggagggaaaaccgctcttgcttcagccaaagtggcaggaatcaccgccgggtgaaggcggcggacaagcagagtctttcagatacgtgacgctgtatggcggaatgaacgctgaggacataaacggcgccgtatgtgcggctgacggggaaggtccgattgaagaccgttatgacgcctgcgcggcggagctgtcagcgatcgtcaagcgtcttatcaaagaaaaacagaagggaaaaacgctgatccagcttcttgtccccgacaggggggaagacaatgtattggcggggctggccgctttcctgaaaacggctcaccttgaacatccgaagctgtacggccaagtcatccaagccgatccggacgagccagcatcatcgcttcttgccaagctgaaagaaaaccggacgcaccctgaacaagcggaaatccgttatcaagccggcaaacgtctcgtcagaaactggcgtcacctgcctgcgcttcaaagcggcgccgttccgtggaaagacgaaggggtttacctcctcaccgggggagcgggcggcatcgggctgattttcgctgaagaaatagcctcccgcgtcaaaaacgccgtcctcatattaacgggaagggcggaagcgcttgataaagaccgctccgcccgcttacggcgcttggaagcgtcgggtgcccgcgtattgtatcaaccggttgatgtgacagacagggcggcggtcatcgccctcgtccgcggcatacaggaggagcacggaacactcgacgggatcattcacggcgccggcgtgatcgccgacaattacattctgaaccagacagaaaacgaacggaagaccgtcatggcgccgaaggtgaaagggcttatcaatcttgatgaagcagcgaaagatgcgcggctggactttttcattctgttttcttccttggcgggaggtatgggaaacccggggcaggccggttatgcggcagccaacgcatttatggacgtatatgcagcccgccgaaatcgtctcgtgcgggacaacaagcggagcgggcagaccctgtccgtcaactggccgctttgggaagaaggcggtatgcgcgtggacaaagagacagaacggctgatgtatgaacagaccggaatgaaagccatgcgatcggcttcaggcatccaggcgctgtacgccgcttttgcctccggagcacaccaggtcatggtggcagaaggcgacgagaaacggattcgaaaaaacctgatgcctgaagcgccggaaccgtcacgcagcattcatgtgtcaaggaagacccacgtccatctgccaaataaagtacaagcggaactcaaacatatgatatcaggcattctgaaggtgaaagaagaagaaatagatgctgaatcagagatgagagattatggatttgattcggtttcattcacgcagtttgcaaatgaactaaataaaatgtatgggcttgaactgacgccggccgtgttttttgaatacccgacagtctttagttttgcccaatacttgctgacggaacatccggatacattcggcccacaggaagaaacagaaacggagaaaccggttgagcgtaaaaaaatgaagacggagccattctcgattccgtcccgccttcctaaaacaaaaaccgcagctgaacctgaagagcccgtggcgataatcggaatcagctgtgcatttccaatggctgaaaatccggaaatgttttgggagaatttagccggagaaaaggactgtatttctgaaataccgccggagcgctgggactggagacagtattacggagatccgcagaaagataaaaatgcgagcaatgtaaagtggggcggcttcattgatgaaaccgctcaatttgatcctttatttttcggtatttctccgcatgaagccgaaatgatggatcctcagcaaagacttttaatgatgcatgtatggaaagcgattgaagatgccggctgctctgcaaaaagcctgtcaggtacaaatacaggcatttttgcaggcacgacaaacagcggttacgctcaggaagcttcaaagttccatatagagattgagggttcttccgctgccggaacggttccgtcaatcggtccgaaccgcatgagctattttctgaatatacatgggccgagcgaaccgattgaaaccgcctgttcaagctcattggtcgctgttcaccgtgcggtcagggcaattcaggccggagactgcggcatcgcgattgcaggaggcgtcaatgctattgtgtcgccggacatgcatatcagctttaataaagcaggaatgctcagtgaagacgggcgctgcaaaacattttccgatcaagcggacggctatgtcagagctgaaggtgccggcatgattgttttgaaaacattatctgatgcggaacgtgacggcgaccgtatttatgccgttatccgcggaacggcggaaaatcatggcggaagggcggcttcccttacatcgccgaatccgaaagcgcagacagaagtcatgataaaagcgtatcagcaagcgaacatcgacccccgtacagtgagttatattgaagcccacggcacgggaacggcgctcggagatccgatagaaatcaacggactcaaagcggcttttgcagcgctttatcaaaaagccggagtaacggcacccgatcagcctcattgcggcctcggttccgtcaaaacgaatatcggccacacagagcttgccgccggcatggccggacttttaaaaattattttgcagatgcagcacaaaacgctcgttaaaagtctgcattgtgaaaccgttaatccgtatatcagcctcgacggcagcccgttttatttcgtccgcgaaactcagccgtggaaagcggcgactgatgatagcggaaatgaactgccgcggagagcgggtgtcagctcgttcggatttggcggtgtcaatgctcatgtcgtgctcgaagaatatgtttctcctgttgaagagaaacaatggacggccggtgaacttcagccgtccttattcattctctcggcaaagacggcggaacagctgaaggaacgtgcggaacagctgcgcagatatttggaaaagtcacattcagctgacggagctcttgcggatatcgcttatacgcttcagcttggccgggatgaaatggaagagcgccttgccgtcattgctgaaacaaaagaagagcttacgaacgcgctgaatgatttcctcagcggcaaggagacggggcagaatttctttacaggccggaacaaagcgatgaaacagctgtttacagagatgacggacaatgcagaaatgagcggggccgtagatcaatggtttgaagcaggaaagtatgcaatgcttgcaaaattatgggtgcaaggcttgcatgttgattggagtaaattgtatcaggacgaaagaccgaaaaaagtcagcctgcctgtctatccttttgcgaaaacacattgctggataccgcacagtgcgcagcatataaggcaccgggagacttacgggactgatacgtccccgcttgagacttatgagcgcctgcttgatgaattggagaaaaacgaaataagcatagaagccgctgtaaaaagaacgatcggtttttacagggattagcgtaatggaggaaaccatatgaaagagtttctgcaccgggttttttctgacgtcaaaaataaaaaaatgacaaaacaggatgcgatcggcattttgcgcgattatgatatgcggatgggacttcgccaaacggattcccttcatccgcttgctcagcagcatatttccgatgaaacgggacagggattctcggcagctttcagcggccgggaattttttctcgctgatgtttctttacagcataaaaagcttatgcctggagaacttcttttggaaatggcgagagctgcggctgttttgacagtaaaggagactgcggctgtccggctgacgcatatcgtgtggtcaaagcccattctgactgaggctgagccgttccatatcgaaatcaggctgatacccgcagagggtgaagccaaaaggtttgagatttataatccattttctgctgattccagtcattatgatgtgtacagccaagggacgattcagccagttgatgctgcgcccggcatgctggatatcagccgcttgaaggaaaacagcggttccctgatggataagcagcaaattgaagccatcactcagaacgataccgttcaatacagtgagcacatgaaaggaattgagcgtatttacgcttcatcaggacggatgctggcagacatatcaattccattgacaaaccaaaaagaatccgcccgattcggcctccctccctgtgtgatgcaaagtgtgacagaggcatgcgcgctgcttggcggcaaagaatataaaacgctcgctccggtttcattggacgagcttttgttttatgaatcttgtcctgacaaggtatgggccgagatacaagagaaggcggggagcttttatattgatttatgtgacggagaaggaaaaatatgggcttctctgtcggggttgaagctgcagcctgtcatcaagacgggcgcttccggaaaaaccaatgccgaacaccgcagtgaacgtttgtatgaacaaacgcttcttcagctcaaaacgctttttggcctgactgcaaaaattgctgtttccaacatagatactgaagagccgctggaaacttacggaatcgactccgtcactgtgacgaaattgaaccgcgaattgtctctgcttttcggtgacctttccaaaacggttttttacgaatataagacactgggctccctggcagctcactttgtcacggattatccgaatgaatgccgaaaatggacaaatgatgatgagcaccgttcaggcatatcagaacaggttttggcaaatgaagattttccggtgcttccgtcgtttatcaagcgaagaaaacggcctgctttttccaatgagaaacagacaaaagaagggattgcgattatcggagtcagcggacgttatccgcaagctgaaacacttgaagagtactgggataacttagcggccggaaaagactgtgtgaccgaaattcccgaagagcgctgggaaaaggacaggtactacaaccctgatcccgaagcggccgtgaaagcagggaaaagttacagtaagcggggcgggtttctgaaagatgccgctttctttgatccgctgttttttcaaatttcaccccgtgatgctttgaatatggacccgcaggagcgtctctttattgaaatgtgctggcaggtgctggaggatgccggttatacgaaggaacagcttgagaatctgtataacggccgggtcggcgtttttgccggcattacgaaaaacgggtacggaatgtactggaaaaacggcggcaccctgcagccgaaaacgtcgttcagttcagcggccaacagagtttcctattttcttaatctgaaagggccgagcatgccggtcgacacgatgtgctcgtcttcgctgactgcaattcatgaagcgtgtgaaaacatccttcgcggcgcatgtgacatggcgattgccggcggtgtgaatgtgtatacgcatccttcggcttatgcggagctcagcgcctatcgaatgctttcaaaagacggaacgtgcaaaagtttcggtgaaggcggggacggatttgttcccggggaaggcgtcgggaccgtgctgttaaagccgctgtcaaaagcgatggctgataaggaccatatttacggggtgattcgcggcactcatatcaatcacggcggcagaacaaacgggtatacagtgccgagtccgagcgcccaggctgacgtgatttccggcgcgcttgaaaaatcaggaatacatccgcggatgatcagctgtatcgaagcccacggcacgggcactgaactcggagatccgatcgaaattgacggtttgacccgcgcatttcaaacgaaaacgtcagataaaggcttttgcgccatcagctcagttaaatccaatatcgggcatttggaagccgcggcaggcattgccggtgtaacaaaactgctgctccagtttcaaaaacgaaagctggccccttcattacattgccgaagcttgaatccgaatattgcatttgaccggacgccgtttgcggtgcagcgtgaattggcagactggaaacggccggtcattgaggaaaacggagcgcagaaagagattccgagaatcgcgggaatctcttcttttggcgcgggcggggcaaatgcccacatattgatagaagaatatattgaacctgatagggagatttctgagccattcacagatgaagatcccgcagtcattttattatccgccaaacaggaggccagcctgaagcagcgggcgcagcagcttcttcaagcgatcagaaaaaatgacgtcacagaccgcagcctccgggatgcggcttacacccttcaaaccggaagagaagcgatggaagaacgtgcggcgtttatcgtgacgtcgacagagcagttagcggaaaaactgcagtgttttattgacggcggaacagacggctgcttcaggggaaaaagcaaacagtataaagatattctagccgtttttaaggatgaagatatgcaggaagccgtccgtaaatggatgaaaagaaaaaaattcgcgaagcttctggaactttgggtaaaagggctgaagattgattggtcagagctttataacggcagcctgccgcatcgcgtcagccttcccggttatccatttataaaggatcgttattggccggacgatgcagcgccggacaatgttcgcggtgctgaaacacattctgaaacatttcgtgaattccgctttttacagaaaagctgggcagaaagcagccgtgttccggctaaggaagtgcggggcgtcatcggaatagccgctgatcaccagacaggaaatttggccgttgagctgtcccgttatttccccgagtctgaaatcattgacgctgcatcaccggaaatatccggggacgcggcccggtttggcggtctgattgatgtgacgggatgcgggacggaaatcaagcatgatgacggctggattcatcgtctgcagtctctcatcgacaacagaaaccgcggccgaaagctacagctgctttgtgtgacaaaggggcttgaaccttttgcgaatgaaacgataaatctctcaggtgcaaaaaaggccggattgtaccggatgctccaaagtgagtataaggatatccgctcgcggcatatggatgcagaacggactgccgaagattccgagctggcaaaccagatcgcagaggagttttttcgcgattctgcagacatcgaagtgtgttaccgaaacggtgtgcgctatcacgcgcggttaaaggaaacaaacagcttagctgaaaaagaattttcatttccgaaagaccatgcgctctggatcaccggagggacccggggactcggatatttattcgcccggcattttgccgaacgttacggagtcacgaaactcgtgcttaccggaaaagaaacaatgcctccgaaagcggagtgggatgatcatatcaaacggaattccccgttttccgataaagtgagaagaatcagagagctcgaacaaaaaggtgtccgaacggaagtgctgtctgtatcttccggccctgaatatgagcaggccgtcagccgggtgaaagagaagatgggaccgattggaggcgtgatacacgcagcgggagccgtagatctcgatcatcccgcctttatccgcaaaacaagagaacagatgatgactgtgcttgaacctaaaactgacggactggaccttttgtatcaagcgctgcacaaggagcctctccggttttttgcgctgttttcttcagtgtccggcgtgatgccggaattaggagcgggacaaagcgattatgccatggctaacgcctatatggattattttgcggccgcaaaaggttttccggtgctgagcatccaatggccgagctggaaagaaacgggtatgggcgaatcaaaaagccgggcctatcagaaaagcggtttaaagagcatcactgacagagatgggctgagcctgtttgatgccgttatggcaggcgattgcggatctgttattatgccggccgtcattcacccggaaaaatgggagcccgaccgtctgatgctttcaaccggccttaccgaaacaaagcagcatgtacagggtgagacagaaagcgtagaggagtggctgacgggcatttgctgccgggaattaagactggagccgtcaagatttgaatctgatacaccgtttcaagattacggagccgattctatcatgcttgcccaagtgtccagagcgatcggaaagaggatcaaagctgaccttgacccggcggtgctgtatgaataccctacggttgctgcgctggcgggatggcttgaaacggcatatccggaaatcaaagctgccgtttcaaaaccggttcagcctgtaatcccggacgttcccaaacaaacagcagccgctgtcattcagccttctggcgctgcagcggcgcaagacatcgctgttgtcggaatgtcctgccgttttcctggagctgaatcaattgaagcttattggaagctgctgtctgaagggtcgtcggctattcaaagggtgccgaaagaacgctggaaaacggagaaggcggattatgcgggccttttaaaaaatgtaacgcattttgacccggagtttttccttattcccgaagaagacatcaaggcaatggatatccagtcctttcttatattagaagaggcgcttcatctgttcagagacagcggttactctttacaagaaatgaaaggcaggtcagccggtgtctatttaggaggacgcggcggcagtatgcctgacgaaaaccgtctgaagcatgcaaaaaatccgatagtcgccgccggcccgaattacttggcggccaatctttctcagttctttgatttgaaggggccgagtctcgttttggatacggcctgttcttcagcgcttgtcggtatgaatatggcgatacaggcgctttcttgcggtgaaatcgactcagcggtggtcgggggagtcagtctgctggaatccggtcaaacccaccggatgttcgaacttcgcaatctgttaagcgaagagcctgcgtttcatatttttgaccgccgcaccggaggcatcgtattgggagaaggcgtcggaatggtgtatttaaaaacagcggcccaggctgtaaaagacggggaccggattcatgcggtcattaaaggcatttccgtaaacaatgacggcagaaccgcggggcctgccacaccgaatatacaggcgcagaaagaagtgatggccaaggcgcttgccaaaagcggcagaaaagcggaggatatcagctacattgaagcaaacggttcaggctctgaagtaaccgaccttttggaactgagggcgattgaagcggtgtaccgtatgcaaaacagcgcgccttgcgaattggggtcgatgaagccgaatatcggacacccgttatgcgctgaagggattgccggattcattaaaacagtgcttatgctctcgcgccgaatgcgtgtgcctttcctttcgggcaaagagccgatgacgcattacgatctgtccgcctcgccgttttatttttcgcacgttctgcgtgaatggacggattcaccgcggattgccgccgtcagcagtttcgctgacggagggacgaatgcccatgtcatagtggaagcctgggagcaggaggcgtataccccggttagaaagcctttgccgagacaggaattaaaacgccggcccatccgtccggacaaagctgaaaacctgcatgaaaacgcacatgaatcccgcccgaatacgttttggaaacaaatgaagacttactgattgcgctgaaaattgaacgtcgatatggaggaagttcatatgcaagagcagcttcttattaacaatcagcatcccgttctgaaacatcataaagcctatggaaaggaactgctgccgggtctggcttatattgacctgatctatcagactttcagagaaaacggtttttttcatgccggccttgaactcaggcacttatcgatttttcaccctttagctcctgaacagggagaaacaatcctgctttccgttgactgtacagagaacggcgaagggcagtggaaggtagaggtgaaagggcaaaaacaaggtgacgaagcagcagagacaaagatatatgccgcggcgcaaatgcattccgtcaagcccgccggcttccaagagagcgtccggatggatgccgtaaaacaaacggcggcagaaataccgcttgaggatatttacgcggaatgcagggatcaagaactggttcattcaggaatgatgaaaggctgcggaagcgtctaccagactgaaaaagagatttatattgatctgtcggtgcaaaaggatcagctggaacatgcagaagaggcgatgtttcatcccgcattgatagatgcgagcagcatcggctccaatgtatatctcgctcctttgacgagggaggaggggcaattatttctgccgctgttttatgaatcattttattgcgccgaattgctgcagacgacatgtatcaccaagataaaaaaagaatccgtcacacgtaagaaagatctcgtttacgtgacaatggagtttttcaatgaggaaggcagaaaagtcggcgaactgaaaaacttcgccaataaacgggtgagggacccggaactgatcaatcagaaacggcaaaagaaagaacctgacgggcggaatgccgtcccggctccgcaagcggaaccggcgccttccgagccccgccgtgcggaggcttccgccggccttactgaacagtgcatcctttatttaaaagaattgcttgccgcccgattgaacaaacctgtgaaagagattgacccggatatcggctactatgaaatggggctggattctccggggctgttggacatggtaaaggaaattgaacgaaaaatcggaacgcagcttctgccgacgctgttatttgaatacacgacaatcgcggaattggcgggatatttgcgcgaacattacggagccggcttcggccatgctcaaagcgggcatccaaatgctgaacctttgcgccgggaaaaaaagaggacgacccaaaaccgcgtgaaaaaatcggcgtcagccggaacgcagaatggagatattgcgatcgtcgggatggcgggacggtaccccggcgccaaaaatcttcgtgaattctgggcaaatttaaaaaatggagaaaacagcgtaacggaagtgcctcgttcccgctgggatacgaggaaatatgagcatttgcgatcgccgtccggcaagccgatttccaaatggggcggttttatagacgatccggattgttttgatgcgaaatttttccggatttctccgcgggaggcagaagctaaagatccgcaagaacgattgtttttagaaacatgctgggaaacgattgaggatgcaggctataccccggaaacaatcgttcagccgaaagggccgaataagagaatgaacgtcggtgtgtttgccggggtgatgcatatggattattctctcgccggcgctgaagctgcggccaaagggctggtctttccttatcccttgaactatgcgccgatcgcaaaccgggtttcatatttctgcaattttcacgggccgagcatggcggttgacacggtgtgttcgtcatctctgacggccgtccatatggcggcggaaagtctgagacgcggtgaatgtgaagcagctcttgccggaggcgtcaatttatcattgcacccgacaaaatatatcacatacggcttgatggatatgcattcgagtgacgggctgtgccgcacgttcggcgaaggcggcacaggctatgtctcagctgacggcatcggggccgtgctgctgaagccgcttcacaaagccgaagaagataaggatcatatttatgcggtgataaaaggcagcgccgtcaatcacgtgggaaccgtcagcgggattaccgtgccgagcccagtggcgcagggggatatgatagctgaatgtcttgaaaagacggggatcgatcccaggacgatttcttatgtggaagcgcatggaaccggaacttctttaggagatccgattgaaatacaaggtcttgttaaagcttaccgcacgtttacggaggatcggcaattttgtgcgatcggttccgttaaatcgaatatcggacatgcggagtcagccgccggaatcagcgggcttcataaaacggttttgcagctgtttcacaaaacgcttgtcccttctttgcactcagagacgattaatccgtatctccgtttagaggactcgccattttacgtgcagcaaaaaaccgagtcatggaaaaagccggcgtatacagagaacggcagagaacattcctgtccgagacgcgcaggcatcagttcattcggggcgacgggttcaaacgttcatctcattttagaagagtacaggcccaaaaaccccggcattacggagaatcaagagagaccgtatatcgtgcctctatcagcgaaaaatccggagcggctgaaggaatacgctgcccgcctgctgatgtttctcaaagataaagcgcttgaaggaagcgggtcgctttatgacaaaacagatacaatgcaaaatcagctggaaaatgcgctgcgcggtgctctggcggaagttctgcatgtagaggccggctcggtagatggtgaacaggattggaaggaattcggcttggatgtcatgcagctgacacagttttctgagcggctgacggatcaatacgggctggcaatagacatgactgatctcatacagcatacttccgtccggactttagcagaatgtctgacaaacgatgagaaacataagaatattctttccggtcttttcggtcagtccggcttagagaagcagtctgatgaacctttttccctgcggtcactggcgtatacgctgcaaacgggacggctggcaatggaagaacggcttgtttttttagtgaacgatcaagcggacctgatcaggaaattaaccgaatttacagaacgaaaacggcagattgacggctgctttcaaggccggtctgatagcggaacggaaatcaggggtttcctgaatgatgatcaggatacggaggagctgatccgaaaatggacggacagcggcacttacaaaaaacttgcggagctgtggtcaaaaggatttgagatagactggacgcggctgtatcgggaggagaaaccgcgcaggatgagtctgccgacatatccgtttgcgaaggagcgctattggataccggagcccgatcatcccgtcacttccgtaaatacagaaagcaggcttcacccgctgcttcaccgcaatacatcagatttgttagaacaaaaattcagcacggtactgaacggagatgaattcttcttagccgatcatatcgtccgaaacaagcgtgttctccccggggcggcttatcttgaaatggcgagagccgcggctgaactggctgccgcgccgttagccgctgaatacacggctaaaaccggcatttcgctgcggtatatcagctggatacgccaggccgttcataaaaaagagccgctgcgtatgacgacaggtctttccttagaggataacggcaatatttcatttcaagtgtacagcaatgaaaacgattcagacatttattgtgaaggcagtgctgtgattgagccgctgtctgaggcggcggttttgcatattgaacagctgaaagcgcgctgccgcaaaaaagtgctgtcaaaagaagactgctatgcggcatttgcaaaggcggaaattgtatacggaccttcacatcaaggaattgatcacatttattgcggggaaaaagaagccttggctaaattggtgctccctgcttccgtttgtgatgaggccgaacagtttgtgctccatccgagtctgattgattccgcttttcaggcggccatcggcgttatgaatgaagataaagcgggttatccggagcagccgttaatgccttttgaattgcatgaactgaccgtttttcatccgtgcagtccaaacatgtgggcggccgtatttgtgacgcatgaaacacgggccgtgcgaagaatggacattgatatatgtgatgaacgcggcaatgtgtgtgtaagaataaaaggattttctgcccggatggccgaaagtgcgccggccgtaaccgataataagcaatacgatctgccgggtaaccttaccggagccgtcaaactgatgcaggtatgggacgcggaaccgatagacaaccaaaccggcttccccatttctgaagcaaaagctgtcatcataggcggtacagacgggcaggcggacgcggttttacgattgtttcctaaagctgtgcgatttgatagcagccaaagtgcttccgttgaagtgatatccgatcggctccgccgtgtcggtgagattcagcatatgatctggtttgcccctcagccggctgattcttacatccatgatcaaaaaagcggggtgctgcaaattttcagagcggccaaagctcttatcggtctcgggtatggaaaagagcagctcgggatgacggtgattacgcaccaagcacagcctatcacccaatatgatgaggtgcgtcccgctcattccagtgtgcacggtttcgtcgggtctctcgcaaaagaacatccgagctggcacatccgtctggtcgatcttgaagacggggggatttccctgcagaagacatattcagcctgccccgcgaccgtacgggtaaagcatgggtgcgcagacatcaggaatggcaccggcctcaattgcttccggtccaaagcgggccgtctgaaagtgttccttaccgatatggaggcgtatatgtcatcatcggcggtgcgggaggcatcggcgaggtttggacagattatatggtgacggcgtataaagcccgagtcgtctggatcgggaggcggccgctggacagccggatacgccaaaaaatagaccggtaccggccatcaggcccggctcccgaatatatagcagcagatgcttctgatcttccatcgcttcagcgcgcctatgaacagattaaaaacacatacggcaccatcagcggcgtcgttcattcagcgatggtatttgcgaatgaaagcgtaaaagatatggaagaatcacagtttcacgccggccttgcggcgaaagtggatatttccgtcaacattgccgaagtatttgcgaaagagtctttggactttattctctttttctcttcggttatttcatatattaagaatccgaatcaaagtcattatgcggcggggtgcgcatttaaagacgcatttgcccatgagctttccgggcggctgtcatgcccggtcaaagtgatgaactgggggtattgggagcgggctgacaatcacatttctgaagagtttgacagactgagtgcaatcggtctcggactgatcagccgggcggaagggatgcaggcgctggaaactctgctgacgcagccgatctcccgcatggggctgatgaagctgaccaagccgattccgatcgagggaatgaaccctcatgaatttgtgactatctgattgcctgtcaaaatgacggagcaaatttaattttcttaggaggataaggttttgggtaagggagacaaacaaaaagaccgtacacagttatccttaagaacagaaataagcaatcaaatgaaagaattgaatcagcttttgctgcaagtgctgcgggtgacgctgcgttcaatgggtctgaccggcgaagcgccggcggcttcctgtctgcctttatatgagcgctggctggaagaaagcatccgtcttttagacagcgatcttaaaagcggtgaaacggccgcgatttgggaagagtggcataagaagaaaaacgaatggctgaaagatccggatatgaaagcgcaggctctgctggcggataccgtcattcaagctttgcctgacattttaacaggcaaaataaaagccactgacgtgatgtttcccgattcttcaatggagctcgttgaaggaatctataagcataacattctcgctgattattacaacgatgtgatggcaaatgaagcgtgtatttatgtggaaaatgtaattaaaaacaatcctgaggcaaacatccgtctgctggagatcggagcgggcaccggcggaacgagcagcacactgtttaaaaagctccgcccctatcaaaaccatattcaggaatactgttataccgacttgtcaaaagcttttttaatgcatgccgaaaaggaatacggcgcggacaatccgtatttgacgtatcagctgtttaatgtggagaagcctgcggcgggccagggattacatctgagaacctacgatatcgctatcgccgcaaacgtgctgcatgccaccaaaaatatccggaaaaccttacggacggcaaaagccgtattgaaaaaagacggtttgctgctcgttaatgaactgggcggacatacgccgtttacacatgttacattcggcttattagagggctggtggctgtacgaagacgaggcgctgcggattccggggtgccccggtctttatccggaaacatggaaatcggttttaatggctgaaggctttcattccattcaatttccggctgaaaacgaacgtctgcacacccagcagattatcacggcgaaaagcaacggagtcatcaggcagagcagggaagcttacaccgcgcaaaagcgccaatcaaacgtaccgcgaacattctctgatcgtcagctccccatcaaacaagcgggagaagggctttcggaaaagacagctgcttttctgataagggctgcggcaaaagtattaaaaatgccggcagaagagataaatccgctggctcctctggatgaatacggtattgactctattctgatcgttcagctgacgaacgagctgcgggatctcgtccctgatatcagcagcacgctgttttttgaacaccgaacgatagaagagcttgccgcatacttggctgaaacgaaggagcgcgaactgcttgcgcgattttctgaagaagtccgtcatactgaagcggtatcatcaggctctttgcttgaaaaaagcacagagtatctgaaacagatcgtcagcgtcatcttaaagatgccgattgaggacgttcaagcccatacgccccttgaagaatacggaattgattccatcttaatcgtacagctgaccaaccgcgtgcgggaagacgtccctgatatcagcagcacattgttcttcgagtatccgacaatcggcggattagcggaatatctcgtcagctcaagacaggaagatatggctgggattttcaagacaaataaagaagccgaaaaggtgccgcacactctacagaaaaagcaaagccgcaaaaaaagcgccggattgacgaagcgccaagcggcatctttttctgaaaaagcgccgcccgcctccgaaccgccgtcaaaacaccttgaagtggcaattgtcggtcttgccgggaagtatcccggagctgaaaatgttaatgagttctgggaacggttaaaaaccggtgaacacggaatcaccgaaattccgaaagaccgctgggattggcgggactactatgatgagacaaaaggtaaggaaggccggatgtatacaaagtggggcggctttttaacagacattgataaatttgatccgctgttttttaaaatctccccgaaagaagcggagcgcatggacccgcaggagagactgtttctggaaaccgcttatgcggcccttgaggatgccggatatacccctgattcactatgcgccggtaaaaaggttggtgtttttgcgggtgtcatgaacggcaactatccgacaggggcccactaccactttatcccgaaccgcgtatcctatgtgtttgattttcacggtccgagcatcgcggtcgataccgcatgctcctcatccttaaccgccattcatctcgccgcagaaagcatcagaacaggtgcatctgaatgcgcgattgccggcggcgtaaacctgattacagatccggttcattatatcggactgtcttctatgagaatgctgtcgccgtcaaacgcgtgcaaagcgttcggtgataaggctgacgggtttgttgacggagagggcgtcggctgtatcgtgttaaagccgttgaagaaggctgttgaagatcatgatcatatatacggtgtcattaaaggaagcgctctgaacgccggcggcaaaacgaacgggttcaccgttccgaatccgaatgcacaaggggaagtgatcgcagacgcgatggagcgggcaggaattgacccgagagcgatcagctatctggaagcccacggcaccggcacttccttgggagatccgattgaagtcgcggggttaaccaaggctttccgccgctatacggatgcaaagcaattttgttccatcggttctgttaaatccaatatcggacacctggaaagtgcggcgggcattgctgccgtcaccaaaattcttcttcagatgaaacacggatatctggtgccgtcgctgcattcaaagcagctgaacccggaaattgattttgaaacttctccttttatcgtgcagcaggaaacggcggaatggagacggccggtcatagaatctgaaggagtaacacgggaatatccgagaatcgcgggtacatcttctttcggagcgggcggggcaaatgcccatctgctgatagaagagtatgaaccggctgaaatgacttcggcggactccggccgtccggcgctttttgttttatcggcaaaagataaagaccgcttgcgcgagcgggctctgttgctgtcggatgccgccggaaacggaacaattacagatgcaaatctgcttgacgcggcatttacccttcaagtcggcagggttcagatggaagaacggctggcgatgacagcggactctgtttctgaattggaacagaagctgactgcttttctgaataatgccgattccgtaagcggggtgtttacgggccggagtgatagtgctgtcacagagacggaaggcacagtcggtgattggatggaaaaacgtcaatttggcagtcttttgaatgcctgggtccacggggcgcccgtcgattgggcatctttatataaaggcgcgctgccgcatcgtatcagtctgccgtcttatccatttgcaaaagaaagctactggatgaagcgggaagaaccaaaaacaggaacaactgaatatgtgcatcctttcctgcatgaaaatacgtcaaccttggcggagcaaagctatcatacatcttttacaggccgggaacacgttttccaggatgtgagaggagagcgggttctgtcggcagccgtttatttagaaatggcgcttgcggcttatcatcatgcggcagacagctctgaagaaaaagagatatggatccgaacggcggcatggactgacccgattaccggcggacatcacggtgcgggcgtcaatctctcccttctgtctgaagacgaggaaggcatccattatgaaatatacagtgatgaagagaagctgcatcattatggaatcatcggtcaagggaacgtacagccatcccgcatgcttgatattgcctccttacaaaaagactgtcgcccgctgtcattcgattatgaaacaccaggcacatcaggtgtaacgatcagtaaggagttccgcaccgttgaaaagctttatacgggagaaaatgcgatttgggcgaagcttgctcttacagatgaaagcggccgtaatccgggatatcatctaccgccggaatttctggacgcagcttttcatgtcttggcaaaaacggagccgtcagtccatatcgtgcctgaaacggttgaagaactgcgcgtcatgcgtccgtgttcatccggcatgtggatgtatatgaataaaaagaatcaaaccggctgtgacattcaattttgtgacgaaaccggcattgtatgcgcagaaatcaaaggggtgagaatgagacagccgtctcagcaggatcacgggcaagaggaacactccgagatgatgatatttgaagaaaggtggacgcagcagcctctgaagaaatccattcatgaagagctgaaaacggtcatctgttttcttacgggagaagctgccagaaaacatgcttatcggtctttacaatccctttatccgggagccggcgtgttttttatttcacagggtgaggaaactcaaaagctttcaaacacgcattatcaaattaaaatcactgacggacaagcatatcaagaaacgtttcggcatattgaaacggctgcaggcaaggcggatgccgttttgtatggatggccgcttgaagatgaaaaggccgtgaaagactattccattctgtatcatgtgatccgcgcagctgcttctttgcgttctaaaccgaggcggatccttctttccgctcagtgcgggaccgaaaccgatatcagttacgccgagtcatggatcgggctggaacggtcgctgaaactgatcctgccggagacggatacggccgcggtttattttggacaaagaggaccgtttgaaaagctgatccataatgtatgtgaagagcttcacagcgggtcgttccgcagtgtcatgtacagtggggaaatccgtcacgtcatggaaatgaagcagacggatattgcccctgttgagaggcgtgtgataaaaagcggaaaaacgtacttgattaccggcggatgcggaggtttgggcttgttatttgccggatattttgctgaaaaaggaccggttacgctcattttgacggggagatcagcggcaggcggcccggtgctgcacaagataaagagattggaagaatcaggcgccaaggtgttttacgtgcaggcggatgccgcagatcaggctcagatggagaaaggtttgcaagaagcgaaagagaaaggatgcgggccgattcacggtgtcattcacgctgcaggtcttcaaggcactgaaagcattctggagaaagatctgcaaacctttcagcaagtcttatcgccaaaaacggacggcacagcggtgttagatcaggttctgtcacgggagccgcttgacttcttctgttgtttctcttcttcttcagcgattttaggagacttcggttcttgtgactacgcaatggggaaccgcttccaaatggcttttatccgccaccgggataaacttgtgagcctcggactcagaagcggcaagtcacttgcaatcaattggccgctttggaaagaaggggggatgcatgtcggcacggcggaaagcaccgatatgtatttaaaatcaagcggacagcgttatttatatacaaaggaaggactcgaagcttttgaaacattgttagtccagccgtccagccagtatctcgtcctggccggttttccgtcgagggccaaacgcttcctgcagatagatcaaggcgaacggccgatttcgggttctgtaaataggaacgtcccgttttcaggaaggcggagtgaaatgaaaggctttacactggaagaatgcgtaagctgggatgtgaaggaactggcggcggggcttttgaaaatagacaagaacagactgacggatgctgacaatctggctgatttcggctttgattctatcagtttggcggaattcgcctcttctttgtccgctcactacggaattgaagtgaccccggccctgtttttcggacattccacactggagaaggtcgtccgctattttctgacggaacacaagtccgtcatagagcatgtctatgaagaaaagaaacctgaatccgcagatcaatctgtctttgaaaaggcaggaacggaaaagcgaaagaagcagaggggaagaaataagctgaacgccggaaccgagggcagtcaggcagctgattccattgccattatcggcatgagcggccgctttcctcaggcgcgcacggcggacgagctgtgggacattctgtttcaggaaaaggacgttgtcgcaccggtcgcaaaaaaaggcttcacaagttcaaaatggaaactcggcgctgtaccgggggcggacgaattcgaccctttattttttgaaatatcgccgagggaagctgaaacgatggatccgaagcagcggctgctacttcaggaagcgtggcgggcccttgaggatgccggctacggcgccagtcacatcaggcagcagacgatcggtatgtttgtgggtgcggaagaaggagattatcaccttttaacacgggacaaaggcaatgtcacgtctcatcataacggtattttggcggcgcggctggcttatcacttgaatttatcaggtcctgtgatggcgataaatacagcatgttcttcggggctcgtttctgtccatcaggcggtattaagcctgcagaataaagagtgtacaacagctgttgcggccggggtgaatatcatgaataccccggacttttttgaaacgatagataaagccggaatgctgtcggaaaacgggaaatgcttcgcgtttgataaaagggctgacggcctggttcccggggaagcggctgcggcggttgttcttaagccgctgagagaggcggaagaagatggcgatccgatttacggggtgattcgggcgagcggcatcaattatgacgggaaaacaaacggaattaccgctcctagcggcgtcgcgcagacccggctgcttacttccgtttatgaccggggccgtatcaaccctgaagatatcgaatatatcgtcacacacggcacgggtacaaaactcggtgatccggtggaaattaacgcgctttatgacgcattttctgcctatacaaacgaagaagcattttgcgcgctcacatcaattaaaaccaatatcggccacacgtttgccgcgtcaggcattgtcagtttgatcagtcttttacaggcattctcccgtgaaatgattcccgccagtctgcattgcagcggggaaaaccgctatatcaactgggagaaaagtcctttttatgtgaataaaacggctaaagcgtggccttctctgccgggtaaaaaccgaatgggggcagtcagcgcattcgggatgagcggaacaaacgcccatgtcgttatggaaagctataagcgcagcgcttcacctcatccggatgcccctgcttatttactgactttatcagcaaaaacaaaggaggcccttcaggaaaaaatcgaagatatgatcacttgggcggaaaatggcggactgaaagaaaatgatctagcccagctcagctatacgttgctaaaaggacggcatcactttaaccatcgcgccgccatcgtggttcaagatgctgatgacgcagtgtatgtatggaagcaggcaaagcttaatgaacatcatccttatgtgttttcgggaaaagtaccgcagcactttgcaggccgacagcatattcaggagcacataatagaagtgctcggcaagtgcagcgcttcatattctgaccatagaaaatatcaggaactgttatgcgtgctggcagatttttattgtcaaggttatgaaattgaaggggacttgctttatggcggacctttgccgcgaatcggcaatctgccgggctacccgtttgccaggcagacgtattgggcgtccgatcgtcttcagggagagcttgaaagccggaattcagctgaacgtgaaaagcttcacccgctgctccatgcgaatacatcgacctttaccgcccagcgctttacttctgttttttcagggcgtgaaccgttttttgccgatcacatcgtcaatggaaaaccggtgcttccgggcgcggctgctttagaaatggcccgggccgccgttacacttgccgctgagggcttgccgggcggaaaagcgggtgtccggctcaaacagatcgtttggctccgtccggtgacggcgctttctgaaggcgtgacgcttcatgtaaaacttcagccggaagaaaacggagacatcgcttttgaagcgtatgccgaaggagaagagccgcttgtctttttccagggaaaggccgtgctcgaagagacggagcgtgctccggtactcgatgtggaggcggttcaggcgcgctgcggcggccggcacatgtcaaaggctgagtgttatgaagcattcgacagcctcggcatcacctacggaccgtctcatcaggcgcttgacgccgtctatgccggaagcggagaagtgctcgcgaagctcactcttccgccgtccgcccgcgaagaaaaggagccgttcttcctgcacccgagcatgctggacgccgcccttcaggcttctatcggtctcgtgctctcagacggttccgcgtccggacggccgtttctgccgtttgccctccgggatatgcaggtgttttctgcgtgccgggagacgatgtgggcggtgctttcctcagcggacggcgcctatcatattgagctgtgtgatgaaaacggcgaggtatgcgtccgattgacggggctcaccgcccgttttctggaagaggaaacggagggaaaaccgctcttgcttcagccaaagtggcaggaatcaccgccgggtgaaggcggcggacaagcagagtctttcagatacgtgacgctgtatggcggaatgaacgctgaggacataaacggcgccgtatgtgcggctgacggggaaggtccgattgaagaccgttatgacgcctgcgcggcggagctgtcagcgatcgtcaagcgtcttatcaaagaaaaacagaagggaaaaacgctgatccagcttcttgtccccgacagggggaagacaatgtattggcggggctggccgctttcctgaaaacggctcaccttgaacatccgaagctgtacggccaagtcatccaagccgatccggacgagccagcatcatcgcttcttgccaagctgaaagaaaaccggacgcaccctgaacaagcggaaatccgttatgaagccggcaaacgtctcgtcagaaactggcgtcacctgcctgcgcttcaaagcggcgccgttccgtggaaagacgaaggggtttacctcctcaccgggggagcgggcggcatcgggctgattttcgctgaagaaatagcctcccgcgtcaaaaacgccgtcctcatattaacgggaagggcggaagcgcttgataaagaccgctccgcccgcttacggcgcttggaagcgtcgggtgcccgcgtactgtatcaaccggttgatgtgacagacagggcggcggtcatcgccctcgtccgcggcatacaggaggagcacggaacactcgacgggatcattcacggcgccggcgtgatcgccgacaattacattctgaaccagacagaaaacgaacggaagaccgtcatggcgccgaaggtgaaagggcttatcaatcttgatgaagcagcgaaagatgcgcggctggactttttcattctgttttcttccttggcgggaggtatgggaaacccggggcaggccggttatgcggcagccaacgcatttatggacgtatatgcagcccgccgaaatcgtctcgtgcgggacaacaagcggagcgggcagaccctgtccgtcaactggccgctttgggaagagggcggtatgcgcgtggacaaagagaccgaacggctgatgtatgaacagaccggaatgaaagccatgcgatcggcttcaggcatccaggcgctttacgccgcttttgcctccggagaacaccagatcatggtggcagaaggagatgaaaaacggattcgcagccatgttttcgatctgcgtgaagaacaaagcgccgccgcaaaagctccggcagagacagatgcaggagatctgaaagatcgggttcaagagaaactaaagcgtcatgtatcagatcttttaaaggtaagcatgaaagatattgaggctgacagcgaactgacggaatacggatttgattcgatcatcttcactgaatttacaaatctattaaatcggtcttatcagcttgagctcagcccgactatcttctttgaatttccgacattgcgcaaactgagcggccatttgatatctgaatggaaagaagcattcagcggcttagaaagagagaattttaaaaccgccccaaaagccggaataagaaaagctgaagctccggcggccgttcatgtcaaacgggaaacgcccgtatccgtaaaaggaaaatcagaagaaaaaaccgaaccgatagccattatcggaatcagcggtatttttccgcaagcgaaagacatagatgaattctggacacgtttatcaaaaggagagcattgcatcacagaaattccccgggatcgctggaattggcgcgaatattacggcgatccggcagcggatgcaaataaaacgtcaattaaatggggcggttttatagatggaatcgccgggtttgacccgctgtttttcgggatatctccgaaagaagctgaaatgatggatcctcagcagcgcctattaatgatgtatgtgtggaaagccattgaagacgcggggtactcggcaaaacggattgccggaacaaaaaccggcattttcaccggcacattgggaagcggatatcaaaccttaatcaataaggcgggtcttcctgtcgaggggtatacgatgaccggaatcgtgccgtccgtcgggccgaaccgaatgagttattttcttgatatccacgggccgagcgagccgatagaaaccgcttgttcaagctctttagtcgccattcaccgcgcggtaaaagccattgaaacgggagattgtgatatggcggtcgcaggaggcgtcaacacgatcgtcacgccagaagggcatatcggttttcaaaaagcaggcatgctcagtgaagacgggcgctgcaaaacattttctgatcaggctgacggttatgtcagaggagagggtgccggcatgattgtcttgaaaaagctttcagaggctgagcatgacagggatcacatctacggcctcatccgcggtacagcggaaaatcacggcggacgctcagcgtcacttaccgcgccgaacccgcaggctcagacggatgtgctgaaaagcgcttatcaaaaagccggtattcagccgtcaacgatcacttatatagaagcgcacggaacaggtacggcgctcggagatccgattgaaatcaatgcattgaaaaaagctttccaaacagacggggctccgggcggatattgcgggattggctcagtgaagacaaatatcggacatttggagctcgcagcaggcattgcgggcgttatcaaagtattgatgcagctgaaacatcggacgctcgccaaaagtctgcattgcgagaacatcaatccccatatcaaattgaaggacagcccgttttacattgtgacagaaacaaaggagtgggaagcgctgcgtgatgaaaacggccgggtcctgccccgccgggcgggtgtaagctcattcggtttcggaggcgtcaatgcgcatatcgttattgaagaatacatgggcaaaagtgagacggaacagccggaaacccgtgagaaagcgtcatctctttttgttttgtcggctaaaaatgaagagcggctgaaagaaagagcgcgtctccttcgcgattttatccaaaacggatcatcccgccatatcgatcttgcagatgttgcatacacactgcagaccggacgggacgcaatggaagcgaggctgggaatcattgcaggctccgcagaggaactgactgaaaaactgaacgcgtttctgacgggaaaaaacagcgaagatatcatcagcggccgtaaaaaacgcgagaataacacgatctccatgttctcagacgatgaagacgcagctgacctcgtcagcgcctggattgagaaaaagaaatacaagaaagtgctgcggctctgggtaaacggatttgacacagattgggagcagctgtatacggacagtaagcctcgccgcatcagcctgccctcctatccgttcagagcagaccgctattgggtgccgaaacgggagcagctgccgctttcgaatcaaaaaacagtagtattgcagaaaacatgggagccttgcgaggcagtgtcttcatccgagccattcagcaaaatagcgctcatcgtctccgaggatacaaaagaccttgccgccgaggtgaaaaaacagctgaatgatgctgacattgtgcaggaaaatcagctcatctctttcttacaggatgcgaatgcggccatctattccgggtttattgacttcaccggctgcggctcccgacaaaagcggcaggacatcagctgggtggcatcgctgcagcagctgattgaatacggccgcggaaaagaaaacatgaaaatgctttatcttacaaaaggccttgaatccttcaaaaataatgcggccgctatgcatggtattgaaaaagcggggctttatcgcatgctgcggcatgaatacagccatattctcacctgtcacgccgatattgatcctgaagagccgctggagcagacagccgcttttattaaacaagaaattgaatcagacttaacggaatctgctgtttgctacagggacggcatgcgcttcagctatgttcttcggcagactgatcagattgaaccagaagccgtgcaaacagaccggactgtgtttccaaaagacgccgtcctcatgataaccggaggaacgcgcggactcggcgctttatgcgccaagcatttcgtttccgcatacggtgtgaagaaactgcttctgacaggcagaaaggagctgccgccgaaaacagagtgggatcttgagcaaacagaccctgtcgtttcggaaaaaatacagcttatccgaaagctggaatcacagggcgtaaaagtgtgcgtctcagcagttgatctgacggataagcaggccgtcggacggcttataaaagaggtaaccacaacgctcggacctgtcggaggcattctgcattgcgcaggaattgcggaccgtgaaaaccctgcttttctccgcaaatccaaagacagtatcgcgcgggtgctcgcaccgaaagcagacggcctccgcggtctgtatgagagtgtaaaggatgatgcgccggcatttttcgtcctgttttcatctgtctcggcagccgtcccgattcttgcggcgggacagagcgattatgcgatggctaattcttatatggactattttgcagaaaacaatgagggcggcatcatgagcatacaatggccggcatgggatgagacgggcatgagcagggatacaaaaagcgggatgtatcagcaaacgggattgctgcgtcactctgacgcggaaggtctcaagatgcttgattacattttaagagaaagacccggaactgtcgtgctgccggcacaagtgaaaaatgattgggacatcaaagcgcttgaaaacgccaagccagccgcccataaaggaatgagaacagcttccaaacctcctgaaacaaaaaaacgggtccataaccggactgatattcaatcttggctgaagtcgcttttggcaaaagagctgagtatcgatgaaacgcatatggatatcgatgtgccttttcaggaatacggaatggattctatctttctggcgcaagtgctgacaaagatcgatcaaaaactgccgtccgtttcaattgatccgactgtccttctggaacaccctaccatagaacagctcgcggattatttagccgcacattgtccggaagctttttcggcagatgcagcggttcccgcggagaaggtccctttgcagaaaacgccgaaacagagcaaaaaaacggcagataagcccgggaaacggggaaaggttgcgatcatcggcatggcctgtcattttccggaagcgggggatataaaagaattttggaagaatctccgcagcggaacggatgccgtcactgaagttccgccggacagatggaacgccggggaacactatcagccgggtgaatatcaagaaggaaaaagcatcagtaaatggggcggttttattcatgatattgatcaatttgacccggagtattttaatatttcagaaacgctggcaccgatgatagacccgctgcaaaggcagtggctcgaagtgagcgcggaagctttggccgatgccggttatcaaaaagaggatctctggggccgccgtatcggcgtttttgccggtgcaagggcaggtgcgtttcatcagaaatttcaatatttgcaaaaagacgcgattattggcgcggggcaaaattttattaccgcacatatggcgcacatttataactttacagggcccaacctggtcgtagatacggcctgctccagttcgcttacggcaattcatttggccgtgcaggctattcaaaatggagaagcggaggcggcctttgcgggcggggttgacattttgcttgatgaaaaaccttttctcacaatgagcgcggcgagaatcttatcgccaaatggccgttcaaaatctttcgatgccgatgcggacggaacaggaatcggagagggctgcggtgtgctgatgctgaagccgctcgaaaaagcgatagaagacgaagataaaatatacggcgttattgacggctctgcgataaataatgacggcagcacaatgggggtgactacgccgaatccccgggcgcagcaggacttgattgagcaggcggttcaatcagcggaaatcgagccggacaccatgacatacgtagagacgcacggaaccggtactttgatcggcgacccgattgaattaaaaggattaaccaatgtcttgtctgcttattccgatgaaaaacaattttgcggtgtagggagcgtcaaaagcaatatcggccacttgctgagtgcggcgggcgcggcgggaatcatcaaagttttgctggcgattgccaatgaagaactgccgccgactttgcattgccataaaccgaacccccgctttcaatttcatgattcgccgctttatcctgtgcttgagctgaagcggtgggacggaaaaaaagagatactcagggccggggtcagcgcgttcggtttgggcgggaataacgcccatatcattgtcagcaacgaaggaattccgaaagaacgaaaagcgaccatggaaccgaaaggcggccagacagtataccgaaaacagcggtattggcctgaaaaagcacagttgtccgaagcggaagaaaatgaggcgggcacagaagcaatgtttgaaataagcgaggtgtgatagattggcagttgccaccgatcaagtcaaaacgttcctgcagaaaatcagccatacgaattatatcgtccgggatcatcgcgttcaccaaatccgcgtcctcccgggcgtgactttaatagatatgctgtatcggctcgccgccgggtatctcggtgaaaggcctatagaattaagacagattatttttaagcagcctgttgtaacatctgaagagtttgataaacacctgtatgtcacctttacgccggcgcgtgacagctggaaagttgagattacaagcgaaaaagcaaaaaacggcacaccgcttggcggaaaacgggatgagaatatggaatgtcagctttatttgcaaaaagacacgccccgggcaaaagagctgaatattgaagcattcatgaaaaacgcaagccgaaaatgggacatgcatgacatttacggaattgcaagaagaagccatattgagcatggcgagtttatgaaaaatgaaggggccgtttatcagcttcaggataaagaagaattaatggagctcactctgagtgatttggctgaaggattccgggagaaattcaaggcgcatccggcttttttagatgcgtccacccttgccggctcttcctttgcattgtcggcccaaaagcagaatgacacaccgtatattccttttatgattaatcgtttttgcatatatcagccgtttccgaaaacgatttacacttattctgcggaaaacagccgcactgaaagcggcgcatcagatagcgaacctgatttttattcggccgacttcacgatttacgacagggaagggaacgtattggccgaatgtgagaaactgacagtaaaaagggtcagacaagcgaatatgattacccatctgatagacaaagagaagccgcctcagcagaacaaaaacggccgtggagagcccgaaagtcctgtggccgcagaagacgtgtctgaacagcaaacgccggaacaaaacatggtgacttacataaagtcggaaatcgccaggctgatcaatcgtccggcacaggatattgatgtgcggaaaggcttttatgatatggggcttgactcggcgcatttgctgaagcttgtaaagatattagagcagacttttcagcagcagttttatccgacactgctttttgaatattcatctgtccgccgccttgcggattaccttatcaatgaagcgggctgtgtgctgaaagattcggccgaagaacggcatacatcagacgctgacatcgctgatgaggttctgttttttgaacccgcctggaaagatcatccgctggaaacggcggtgcagaacgggcaaaaacacacccgtcatcttattattgctgccgatgcaggaccccgtctcaccggtgaactcggcacacattgcccggaagcggaagtgatagaactgaaaagggagcatgaggttgcagatgagcagtttggagcagatgccgagcttatatttcgtatgcttaaacgggaactgacagaccatccgaaagaacatacattgattcagcttgtatgcgccgttgagaatggagcggcattgtcttccgctctcggggctatgctgaaaacggcacatctggaaaatccggctcttcgcactcaggtgatcaccttctgtgacaagaatgagagattgccaagtgagacggccgcaatcattagaacagaagcagactgctctcatgcaggctgcacagacattcggtataaagacgatatgcggcagatcagattgttcgaacgtattgagaaaccgggcggacagacacagtctccttggaaacaaaacggcgtatatgtcattacaggaggtctcggcggtcttggatttctgcttgcccgtcaccttgcagaaaaagaaaaggtgaagctcgcactcatcgggcgttcgccggaacagtctgagaagatcagcagactgaaagcattgggagcggaagttctttacgttcaagcggacatcggcagcaaagccgaaacagagcgggcatttgctcagattacagaaactttcggccgtctgacgggcatttttcattgcgccggtgttttaaaagatcaatttatcatccaaaaagacagtactgacttgaagagggtgttcctgccgaaaatcagcggcctgattcatgcggacgaagcttcacggcatgaaccgcttgaatttttcgccgcattttcctcattctcggcgttgaccggaaatgcgggccagacagattatgccgcagcgaacgcttttatggatgaatatatgaaatatcgcgattgcaaagcggaaaaaggcgaacggaccggggcttctatgacgatcaactggccgctttgggaagatggcggcatgcaggttgacagtttgatgaaagagatcatgaatgatgcaaccggcaccagcccgcttccggccggggaagggatggcttcactagaatatatgctgcgtctcggcaagctgcaatccgttattttatacgggaaggagcctgctgtaactgaaagcatggcccgattggttccgatggcagacaagaaccgctcttcattatcccatgcagctgtcaagagaaggagccgaaaacaagagagacatacagaagagcacgatattgccgtaatcggattggcgggaagatatccgcaggcgggaagcatcgatgaattttaccaaaatctgcgctcaggtaaagactgtatcacaacaatgccgaaagacagatggaaaggttatcctttctcatatgaagcagatcagttctactgttacggaggatttttagatcgcatagacagctttgatccgctgtttttcaatctgactccgcgccaggctgaaatgatggacccgcaggcgcggctgtttttagagacggcttgggaagcttgtgaagatgccggtttttatcaggacagaacggcgcgcgggccatcttcacaaaaaagaaaacgcgtcggggtattcgcaggtgtgttttggagccattatgagctgttcggcgctgaaatcacacagcggggcacaccgctgtctatgggcgtgacgcctgcctccgttccgaatatcgtgtctcactgcctgaactttacagggccgtcaatggctgttgatacgatgtgctcttcttcgctcacatccatacatttggcatgtgaaagcattaaaaggggggagtgcgaattcgccattgccggcggtgttaatgcggtcacacatccgcataaatatgcgtttttggcgaatgccggatttctgtcttcagaaggcgtctgcaaaagcttcgccgacggcggtgacggctatgtgccgggagaaggcgtcggcgcggtgttgctgacaaccgttcaagaagcggaaaagatgggctgtccgatatatggcgtcataaaaggctccgctttaaaccatgtcggaaaaacatccggtttgaccgtgcctgatccggcatcacaggcggaagtcattacagattcctttcagagtgccggcattgatccggagacattgagctatattgaagctcacggaacgggtacgtctctgggtgatccgattgaaattgaagggctgagccgcgctttccgcaaatggacaaacaaaaagcggttttgcgccatcggctctgccaaatcaaatatcggccatttagaaggagccgccggaatcgccggattaacaaaggtgcttttgcagctgaagcatggagaaatctttccgtcattgcacgcggacacgctgaatccccatattccatttccggatacgccgttttatgtggcggaccggctggaagaatgggaacggccgtcacatcctgaccagccgagaagagcgggtttaagttcttttggcgccagcgggagcaatgcccattttgtcatagaagaatatctgccgccgcaggctgaaaagaaatcgctgagtatacgggaagacgagccggttctgtttctgctttcggcaaaaaatgaagaacggctattggaatatgtcaaacggtatgaccgctttttacgggaaaaagaagtcaatcttaaagacctggcctacacgcttcaagcgggcagagaagcgatgcctgaacggctggcattgatcgttacatccgtttgcggcctgcaagcgaaactgaaggatgtgcttgaacggaaaacggaaattgaagggtgtttccgcggacgtgctcaagatgttatttcaacaagtggaatggccgagcttttgaaaaacaagcaatattccagattgctcacggagtgggcaaaaggagccgccgttgactggagccagttatacgaaggagagaagccgaaacgggtcagccttcctgtatatccgttcgcgaaggagcggtattgggtgcctgtgcctgcggatatccggaaacagacagacgaaccggcggaaaaccaaaagatcattcttcaaaaagactggaagcagcaagatccggcggagtctgaagcattatcaggaacagtaatgatacttgcaactgataagacgagccgattggccgatgctctatttaaaggaaacggccatattgaaacgatctgtttcatccatcaggcaaaagacggcgccgattattacgctgccgcatcggggcgaaacctttacggcagagtgcgggagtctcttcaaaacaaacagatactcggggtcgtcgacataaccgcatatgatgcggaatatgaacggcgggaagagatagaatacggaaagcttgcctttttacagcaggttctggaatcattccgtcatagcggcgctgtgctcagccaagtgacacaccgcctccagcctttcaaggaaagtaaacctctgatgcagggggcgaaaacggcggggctgtaccggatgctgggcgctgagtatgccaacattcattcttttacgatagatagcgattgtgcgattgagcatacagaagaattaagcagacagattgaaactgaatttttacagccgcgggccaaaagcggcagtgaatgctgctacaggctgaatcgccgttatgtgccgtttctgaagccgggtacgaatgtgtctgcggtgcctgagctttcctattcgtctgatgatgtgctgttaataacgggcggatcgcgcgggatcggcgcaattgcggcggagcatgccgtttcacgcgggtgcagaaaactggtcatcatggggcgggagccgcttcccgattcctcggagtgggaagacatgaaaaaggacggcattctcccggaaaaagccgagcggatgcagaggttagccgagcggggcgcggagatccgttattacagcgtttctcttacggatcaaaaggggctccggaacatgacggacagcatccgcggcacaatgggaccgattaccggtgtttttcattgcgcgggtgcaatgggagaacaccccgctttttataacaaaaccgaaactgagatcgaaagcgtttgcacgccgaaagtaacagggcttggcggtctctatgaagccgttcggaatgagccgctgtcgttttttattttgttctcatccgtttcgggtctgatcccttcgcttgctgcggggcaaagtgactacgcgatggctaattcatttatggactcttttgcaaatcatcaggcaggcaaaggaaacgtgtttgttaaagccgttcaatggcccgtctggaaagaaaccggcatggctgaaggcctgccggaaacacctgcttatcaaaaatcaggactttccaggctgtctgccgaagacggactgaagtttttagattacatcatattaaacggacaaagctgcggaattccttgtgttcccgaagacagtaaggctgattttggtgatcttctgaaggtgaagaaaactgaagctcccatgaaaaaaagcagtgccggtgaccaaaaggtgaaggatatgattcgtcaatgggtgcgcaccgttttcagcgaagaactgaaaatgacggatgagcagataaaagatgatatgccgtttgatgaatacgggattgactcaatactctttgcggaattggttcaatcattgcaaaaacggatcagcatcaagttaacaccgtccttaatgcttcaatatcaaacgattacagaaatggttgactatttcgcagcgcatcatgaagccgattttgtgacaaaagaaaatggtttcgttcaagacggggacgttcagcctgatgtaaccgccgccgctgaagagagaacatccatgaagccgaaagcggataccgaagacgatattgccgtcgtcggcatctcctgccgttttccgggggcgggcggaacggatgctttttgggagctgctgatgaaagggaatactgccatccggcctgtccccgcatcgcgctggcatgcaacagcaaatgcaaaggattatgcggggtggattgatgatatcgacatgtttgatgcgggctttttcggcatctctgaaaaagacgcggcaattatggacccgcaggcgcggatcatattagaagaagcggttcattccgtttatgatgccgggtacggccaaaaggatttgtcgggccggaaagtcggcgtgtacatcggcggcagggcgcagccttcagccggtatggaacatatcctgcaggcgcctaacccgattttgggggcggggcaaaactatttggcggccaacatttcacgatttttgaatgtcacagggccgagccttgtcgtggatacagcatgttcctcagggctgatcgggctgtcctttgcaaaagacgcccttttggccggaaggattgacgcggccttagtcggttcggtgagtctgctcttatctccgtccgcgcaccggttattcggagcgcgccatattttaaatgagaacggcgtgtttcatatattcgaccgtgaatcagcgggagaagtgctcggagaaggagcgggggcggtttttatcaagcgattgagcgatgcggtgcgggacggagaccgcatttacggcgtcataaaagccgtctcggtaaacaatgacggccggacgctcggtcccggttcaccgaatataagagcgcagagagatgtcattcaaactgcgcttaatatggcggaaaagtcgcctgaagacatcggatatatagaagtgaacggaggcggttccccaatcgttgattcggtggaaatcaaggcgctctcagatgtctatcagctgaaccggaaaacgcttctgccctgccggatcggatcggtgaaaccgaatgtagggcatttgcttctgtcttcaggtcttgcgggcttcatccgatgtgtgctgagcgtctatcataagcggattccgcctttcttatcagcgcgtgacccatttgaacattatgactttgaagcgtcgcgtattcattttaatcgtgaacccgttgattggcattcagagaagaaaccccgcgtcgcagctcagagttcatttcctgacggcgggacaaatgctcatatcctcgttgaagaatacagaggtgaaagacagcgggaacatcaccggtcgcctcagccgccggaattcagaaaaaaacactacccgctcttgggcggctggaacagcacggaaagtgaaccggaaaaaacaagtaatgaaaaaacggacattgcggatcttttaaagaaatatgagaaaaaagcagagacaagcactgcacctgcagactcgttttggcaggtgacaacgtgacgtttttaaaaggggactaaccatgaaaaaaacagtgaatctgcgcctgacggcagagcatcccattatgaaaaaccatcttgttcacggagaatctgtcatgcccggtctggcctatattgatatgctgtatcagctggcaaagcaaagccttgatctttcattccgttccatctgtctgaaacgggtgaccatttatcatcctttatcagtgaagcggtcagagcggcttgatgtgagtgtcatattcagtaaagaaaaggagttctggactgcctcgatttgcgaggcggattccgggacggttttcttatcagcggagatgcatgaagaagtcttctcatcagacaggcgtcttgacgcaggggagaaaaaacaacaagccgcacttccatcagtctccttgcatgcggtttacgaagccgcgagaagccgcggactgtcgcatgacgggctgatgaagccggagggagagatctatgcttatgaagaggcatgtttccttgatattcggcagtctgattcatgccgggaaaatctccccggcgctctctttcatcccgcgctgatggacggtgccgccatggcctccggcgtattgcagacagctgcaggcgccgagttatttttaccgatttattatgagtcgtttattgccgctgagactgttacggagcgctgttacgcggtgatttcgaaaaagtccggcacgccttctgaaatggtgaaaatggatattgacttttacaacctcagcggtgcgcatattgcttcactgctcggcctgacagccaaaaaggtgcggtttgaccggcagctgataccaggcgttcagcagatggaggaaaccttataccgcattttctcgacatacgtaggccgttcagtcacaagaaatgatgcgcacaccgtgttttttgaattaggtcttgaatcgtcacagcttctggctattattaaagacatcgaaggggcgtttgatctgcgtctgaatccgactcttttatttgagtgcagcagcatatccgaactgctcgaagacataaaaacaaaaggaacagatgaatcttccagccttgtcgcagatgcagcaccggtctctgaaacacaatcaggcagtcagacatttactttctatgaacatgaagcattccttcaggatcatctggttttcggcaaaccggcactgatgggtgtagtgtatccgtgtctggtgcttgaagcatccggagcgtctcattccggcacgtgtcccgccgagctgaaagatatccgctttacgggcgggcccgtcacgctggagcctggagaggccgcgcagattgacatttcatttgcggcagaaaagagtgccgaacgctttacagcaagctgcactgtctccggtaaagaaagccggaagacatgtgcggaaggagaaataagcagatatacagaggcacccataaaaaaatcatatgacgttgagcaaatgaagtcgcatgcacaaaaggtggcgccggatgtcatttcccgtctgtacgattcggttgccgacttcacgataggcccgatgctgaaaacggtaacagcgggatacaaaatgagtgagagctcctttttattgcagctggacttatcaggaaaaaaagaaaaaggcgatctgcatcactttgcatttgacccgcttatattgaattcatgttatatgtcgctcggtgaagaagaattgcagctgaaaaagcggattcacgtcccgctcatgattgagaggctgacgctttacggacctgtcatgtctgataccgtctatgtggtgaatacaatcaaacataaaaaagacgggtttctctcatttgatgccgcaatcctcagtcataccggggaacagctggcggaattgaaaaatgcgtctgtgaaagaagtgcttcagccaaatcggcttgaaaatgcgtcttttgccccgtccgggaatcaaagccgtcaggaaacgaaaggaaaaccgctggatattgccattgtcgggatttccggcaagtatccgcaggccgatgatatcgatgcgttttgggataatctcaaacaaggcaaggattgtattaccgaaattccgaaagatcgctggaaatgggaacattacttttccgaggaccgtacggcgccgggagcgatctacagcaaatggggcgggttcattgacgggatcgccgattttgatcctgagttttttaagatttcccccgggaagcggaacaccttgatccccaggagcggctgtttttaatgcatgcttggatggccatggaggatgcgggatatacgaggacatcacctgaactggggcgtcaggtaggcgtgtatgccggtgtcatgtatcaggaatacccgctattcgcggctgaagcgggagtgaaaggacggcatatcgggctccccggcgggatttcatccattgctaaccgtgtctcctatttttgtgactttcaagggccgagcatttcggtcgatacgatgtgttcgggttcgctgacttcattgtacatggcgtgccgggatctgcgggatcatcggattcgcgcggcgcttgccggcggagtgaatctcaccgttcatcctaacaagtacttcatgctgagccaggggcagttcatctcatctaaaggacactgcgggagtttcggcgccggaggtgacggctatattccggcagaaggggtcggggtgctgcttcttaaacgtttagaagacgccgtacaagacggagatcggatttacggcgtcattaaaggagctgccattaatcacggcgggagagcgagcggttacaccgtcccgaaccccaaggcgcaaagcgaagtcatttctcaagctttacaggaagcgggggtatctccgggccggatcagctatgtggaagcgcacgggacagggacgaaattaggcgatccgattgaaatccgggctttaaccgatgcattcggtgatgttcctgaaacatgtcttgtcgggtctgtcaaatcaaatatcggacatggggaatcggcagcaggcatcgccgcagttacaaaagtgctgctgcagatgaagcacaaacaaatcgccccatccttgcatgctgatgttttaaatccgaatattcaatttgatgaagggccgttttccgtctgccgtgaattaacagattggaaacggatttcagcagacggagaagaacagccgctcagggcgggaatcagcagctttggtgcgggcggttctaacgcgcatatcattattgaagaatatgaggctcctgtcaaacaagcaatcagcagccaagagccggcggtcattctgctgtctgcgaaaaatggcgagcgtctgacagaatatgcggagcgccttcttgcttttcttcaaaagaagcatattgataagccggacttatttgatgtcgcgtacactttacaagcggggcgcgaagcgatggatgagcggctggctctcattgcggactcccttaaggagctggaggacaagctcagatcgtacttggaaaatgaaaacgcaccgcatctttacaggggacgggcgaagcgaaatcatgagacagtggctgtgtttgaatctgatgaagatttgcaggaagcgatggttaaatggctgaaaaagagaaagtacggtcatttgctgaaaatgtgggtgcagggagtcgatgtggactggaacttgttatattcggaacaaaaaccccggagaatcagtcttcccgtctatccgtttgcaaaagtcagatgctggattcaagatgaagccgaggcggtttcaaaaagggatgacggcaaaacggtgatccatccgctgctccatgaaaacacatccgatctttgggagctgaaattcacctctgtttttaccggacgggaattctttttcactgatcacacagttaatggacagaaggtgctcccgggagccgccgtgatcgaaatggccagagcggccgttgagcgtgccgcatacgctgtgccggacggacgtaaaggaatgtatttgaaagatctcatatggatgaggcctgtcattcataaagggacggatgtagaagtccatatcagccttattcttaaggaaaatgaagacattgaatttacgatttacagcctatcggaagaacctggggagaacggattttatacagtaaaggcactgcggtatcgggagagatagcagcggttccgtctgttcatttagagggctggctgtccggctgcagtcaatcggttatgacgtctgatgaggtttatcaggctttccggcatgcgggtatgatctacgggccgagccatcaaggcattgatcagctgatgatcggagagaggggggctgcagcccggctgtcgctgccggaaacggcagacagtaccgccgatcagtttgtcatccatccgagtcttctggatgccgcgtttcaggcgtcactgggggccggttcagatactgccggagacactccgatgctgccgttttccctgcggcaggcagaaatatttcagccgactcagaaaacgatgtgggcgcttgtccgcaaacagagcgatcggtcagataacggagcgctgacgctggatattgatttatgtgatgaaaacggcgctgtttgtatgagattgacgggcttctcctgccgggctgtccggcagacaaaccaaaccgaaagcaaacggcaggaagttcagacggcgatgcttgcccctgtttgggacaaaactttcttttccctggaagaaaatcgagcggttgatcaggaacaattgctgatcatcggaaagccgggaaataccataaaggccgcggcaaaaatgtggccccgcgcccatctggcggagacgccggatcattcaagcgagcaaacattacgtgaattgacagccggttatcaagatatccgccatttcttatggattgcgccggatcgtttcgcacccgcatccgccagtcaggaaatgcttgatgagcaggagaatggggtgattcaatgtttccgtttcatcaaagcgctgctgtcactcgggtatggaaaccgaaacatcagctttacggcggtcacccggcagacacagtccgtgtatccgggtgatctcccgcagcctgagcatgcaggcgtacacggtttgatcggttcattggcaaaagaatatccgaactgggacatcaggctgattgatgcagaagaaggcagtgattcgtctgagatgaaaaacatctggcgccttcctccagatccggacggaaatgctgccgcgtaccgtaacggagcttggcacaagcaaaaaacagtccgggtgctgacaagttccgctccgcgtatgtcgtacagagaaggcggcgtttatgctgtcatcggcggagcgggcggcatcggagaagcatggagcaaatacatgatcacccgttacaaagcacggatgatatggatcggcaggcggccgaaggatcaggagattcagagcaaaatagacaggctggccctatcaggccccgcgccgcattatatacaggctgatgctcaagatgccgcagcgcttaaagcggccgtccgttccataagagagcgatacggcaatataacgggagtcatccattccgcgataacgcttgccgacaaaagtatggcgaatatggatgaagcttctttcagaaacgctttttcagctaaggtgaatacgagcgtccgaatgatcgaagcttttaagggagaaccgcttgattttgtgctgtttttctcatccgttaattctttcacaaaaaatgccgggcaaagcaactatgcggcagggtgtacatttcaagacgcctttgcccgccatatcgcttccttgcttgattgtgaagtgaaagtcatgaattggggatattggggcagtctgggcgttgtatcagacccgtcttacagaaaacggatggaggcgtcagggatcggttctattgaacccgatgaagcaatggaggcgctggaagtcttactatcagaaccgttcagccaagcggcattcatcaaagctgctccgcacggcttagccgcactgacggatcaagatgcaatatcggttgtatccggcccggagccttcatttatggaaagcgtcaagcggcaaaatccggatcggaatgaacggcttgagactttaaaacgagaaatggagttgcgcatatgaacagccttctttgcaaactgctcttttatcaattacagtcaatcgggtttttcagcgagcctgtcaccacacctgcagcatccatgcggagcgccggcgtgatcggcacatacggcagatggctggaagaaagcctgaatctattaaaagaaaacggatatatcgcgtatgacggatacacgatcactcttctcgcggatcagcgcccggacggccgcacagtctggaatgagtggaatgcccataaacgcctgcttcccaagggggagcttgcgcaagctgaattggccgaggcgacgataaaagcgatgccttcaattttaaaaggagaacgtccggctacggatatcgtatttcccgattcatcaatgcggctcgttgaaggtgtttataagcataatcccgttgcggattattttaatgaagtgttagcagattccgcggccgcttacctgaaagcctaccttacagaacatcccgatgcccgtatcaggctgatagaagtaggggccgggacgggcggaacgagcgccatgctgtttacaaaactgaaaccatttgcaaaacagattgcggaatattgttatacggatgtttctaaagcttttttaatgcatgccgaacaggaatacggacctgatgtgccgtatttgacaacagccttgtttaatgcggaggagccttgcgaatcacaaaatatcaaaacgggtgtttacgatattgtcatcgccgccaatgtgcttcacgccacaaaaaatatcggtttgacactgcgccgtctgaaagcgctcctgaaatacaacgggatgattttgataaacgaaatcagcgatcgttctgtttttacccatttaaccttcgggctgcttgacggctggtggtcctatgaggatgctgagcttcggattccgggaagtcccggcctatatccaaaatcgtgggagcgtgtgctgcattcggaaggatacagagcggtttgtttccctgctgaaacggctcatgatttaggtcagcagattatcgcagctgagagtgacggactcgtccggatgcaagggatcagagacggcagaaagccatacgccgccccggccgaagttttccgaaagcccgcacagcctgtttcccgcagccgcgcgccagaggagcatcaagctgttaaggctgatggggaatcggtcgcttcccatgtccgctctgtcatcaaaacaagtattgccgatgtattaaaaatgaaagaagaggatattcaggaagaactgaatttctctgaatacggtattgattccattttggccgtcaatgtgattaacgagattaataagcgattgaatcttacactgcagacaacgattttatttgattactatcatgtgaaactgctgaccggttatatctcggcagaatatgaaaccatcatagcctcatctctggagaccgaaagagcgaaaatccgcccggtgcttcaggaagaacggcctgctgaaaaacctttgaagacggatagaaaggaaaacggttatcagaaaccgaaacaagaacggatgccgctttctttcgcaaagtccgatgactcgggaatgttccgggttgtgattgaccgtccgggcggcattgaagatctgacgattgcccgcagtgaagtgcccgagacaaaagatgacgaagttcaaatagccgtccgcgccttttctttgaacttcggagacttgctttgtgtcagagggctgtatccgacgatgccgccttatccgttcactccgggattcgaagcaagcggcgtcgtgatcaagacagggaggcatgtaacatccgtcattccgggtgatgaagtgattgtcggtatgggagaggaatttggctctcaggcgaatctcatcacatgtaaagaacatcaagtctatcataaaccggcccggctgacctttgaagaagcatgcgctcttcctaccgtggcagtgacaatgatagacgccttccggaaagccggacttaaaaaaggcgaaaaaatattaattcagaccgcgacgggaggaacggggctgatcgcggtgcaaatggcccggcatatcggcgcggaaatatatgcaacggccggatcacagaaaaaaattgagtatctgcattcgctcgggatcaacaataccatttgctatttggaagaagattttgaaacggaaatcatgcgaatgaccggcggccgtggggtggatgttgtcattaataccctggccggtgatgccatgcaaaaaggaatgaattgcctggcgccgggcggaagatatatcgaaattgccatgactgcgctgaaatccgctaaatcagtcgacttgtccgtccttcataacaatcaatcgtttcacagcgtggatttgcggaagctgtctcttcaaaatccggatcaggtcaaggactatcaattggaactgcagcggctggcggaagagggagtcattcagcctgtcatctcaaaaatcttttcctttgaagacataaaagaagcgtatcactgtctggatgaccgcggaaatatcgggaaaatcgtcatcagcgtttctgagccgtatcaaatgacgtaccgccccgaacaaaaggatccggccgaaacggtaaaatcagcagctgtgttacctgaaaaagaaccgatcgcgattatcgggatgagcgggcggtttgctgaatcggagaatgtccatgagttttgggaaaacttagccgccggacgggatctgattaaaaaagcagacagatgggctgtctctgacagtcaatgccagtatggcagttttatagagggcattgaatgttttgatcccgttttctttcatatatcgggacgtgaagcaacctatatggacccgcagcagaggctgtttctggaagaatcatggaaagcgcttgaagatgcgggatatgcgggagactcggtaagaggccgggaatgcggcgtgtatgccggctcctgcggcggagattaccaggccatttttaaacagcaggggcccgcgcaggctttttggggcaatcacaattccgtcactccggcaaggatcgcctatcaccttaatttacaagggccggcgatcactgttgatacagcatgttccagttcgctgacagccattcatttggcatgtcaggggctctggacgaaagaaaccgaaatggcggtggcgggcggggttttcattcaatccactcccgctttttatcagtcgtcaaataaggcgaatatgctgtcaccgaccgggcgctgccatacgtttgatcaaagcgcggacggcttcgtgccgggtgaaggcgtgggagcggtggtgctgaaacgtcttagcgacgccgtcagtgacggagatcatgtgtacggcgtcataaaaggctctgcaatgaatcaggacggcgctacaaacggaataaccgctccaagcgcgctttctcaagaacgattggaacggcatgtctatgatacttttcacattaatccggaaaccattcaaatggtggaagctcacggaacgggcactgcactgggcgacccgatcgaattcagcgccttaacgcgcgctttccgccgctatacggataaaaaaggatattgcgccatcggctctgtgaaaaccaatctcggacatgccgctgcggccgcggggatggccggattgtttaaaatcctgctgtcgctgaagcatcggcagattccggcttccctgcattttcatcaagccaatcagcatattcaatttgcggacagcccgttttttgtgaatgaaaagctgataccgtgggaacggaatccggatgcaccgcgcagagccgcgatcagttcattcggattcagcggaacaaatgcccatcttgttattgaagaggcgccgcaaaccgtgcgccggtcaccggcaaaaccggcctgcctcattcctttatctgcgcggacggagcgtcagctggaaattcaggcagaacgcctgctggattcactcagcaagaacaaagacagcgatctgggaaatataagttatacgctcctgctcggcagaaagcatctgcatcaccggtttgcctgtatcgtaagcagtgcggacgaactgaagcgggtattatcggagtggcttgtaaaaagagagcttccgggtgtgtttgtgtccaatttgaaggaccagaagccggcagacgaagccggaatgaaaacattcggaatggaatgcattgaacagtgctgctcggcggcttcacccgcacagtacagagaaagcctggcacatatcgctgaccttttttgcagaggatatgatcttcctttcacacggctttttgacggagggcaatattataaaacgccgcttcctgcctatccgtttttaaaagaaaggtattgggcggctgatgtaaacagttctttaccaggccaagccatgaaaaagtctgaaacgcaaaccgttcccccgtctccgccacagcctgaacatgaaggtctgatttctctgagtcctttaactgagatcgaaatgacagcgtttgaaccggagacattgcaaaaaccgatcgtcttacagcctttggattgtactgttcctgtccagcagccggaaaacgccgtttccgaagacaatagaacattgcttgaagaattgaggataagcctggcagatattttatttttgtcgccggaagatattgatgctgatgagcctttcatcgacatggggcttgactccattatcggggttgaatggatacaaacagtaaataaaacgtaccacactgagattactgccaataaggtgtatgaacacccgacgcttgaggagcttgcggaatatatagcggggcaaataaagaaacccgagtatgctgaagcggaggaaacagcggtacgtccgcaaatcccggaagcagaaactccccttgccggcatctctgacggcactttgcgcaaagagcttaaagaaagccttgcggacatcctgtttctgaagccggaagatattgatgagcatgaggcattcattgacatggggctggattctattatcggtgtggaatgggttcagtctattaataaaacgtatcaagcgtctattacggcaaatctggtctatgaatatccgacaatcgcaaaattagccgggtatctgaccggttccgttcaaaaagacactgatgaagtacatgaggaacatacgaaacaaaacgatatatcagaagagacagatgatcaagaaccgcccgaactgatctgtcttaacccggggggaaagggaagaccgattttctggtttcattccgcgctgggggcagtggagctgtaccagcctgttgccgaacggaccgggcgtcctttttacggaattcaggcaagaggatggatgacagaccgggaaccgatccgcggcattaaaaacatggcggaatattacgttaagctcatacgtaccgtgcagccccggggtccttacgatgtaggcggctattcattagggggcatgctcgcttatgaagtcacccggcaattgcagctggctggagaaaccgttgagtcaatcgtcatgctcgactcctttgactcggcgggtgcgcgggaaataaacattcctgatgaattatttgataaaaatatgatgctgcagacggtgaacatggctttatttgcaccgatctatcaacatccggaacgcatttctgaaaccttgattcaccgtgatgaactagatgccgatcttcatgaagacatatttttagagcaattaatagcaaaagccaaacagcgggggttaacgaagacggacgcgttggtgaaaaatctgatcaggcagaatataaacgttcaggacgcttacgaaatcactgattacgaactcctgccgcttccggatccgaacggggtgacatgctattatttccgaaataaaaacggtattttcttgggtgagcttgatccgtattttacgatcagggccgatattttatccgctgatttcgtcaactactggagccagtggcaagagcatatgacaaacatcgccatcatggatgtggcggtatccaaccatatgacgttattggctgaagacagcgcagccgaaacgatttctgaattttgcggcgttttatattcggcagacggaatgacagaacacagctttctgaaactgcaggaaaagatactgaacgtgcatggtgagatgctgaagcagcccgccaaaataagaccgtaaattcacatatccgcccgccgggtttactcgtaagctttggcgggtcatttcaaatcttggacacatcttggaggaatgaaaatgaccagtttaacaaaaatcagacagcagcagccgtacaagtggtaccaaacgatgagagaaacctctcccgttcattacaatgaaaaggaagattgctgggaaatcttcacctatgatgaagtgaagcgggtgatttctgactacagtcatttttcttccgatcataaatacttaagtgcggacaagcaggaaaaaatgatccggcatattaacaaagacagccttttgaaaatggacccgcctgaacacaccgtcttcagaaaattggtcaatcagccgttcatgccgaaatcggttgagtctcttgcaccgcgtatagccgctatcgctgatgacctgcttcaggccgtccgttcaaaaggcaggatggacattattgaagattacgcatttccgcttccgattatcgtgatcgcagagcttttaggatttcctccgaaagacagggatatctttaaaagctgggtcgaccaaagccagaatgtaaaagatgaaaagaaaatgaatgaagtgcaaaagcagatgatcggatactttatgcagtttattttacagcggagaaaacagccgcaaaatgatttaatcagccatttaatttcagctgatttagacggagagccgctgtcagacaagcaattaatcggtttttgcggcttgttgatcgtcgcggggcacgtaacgacggaaaatgtgatcggaaattcatttctcagtctcaaggagttcccgcatattctgccccggctgcttgaaaataaggcgctccttcctgactttattgaggaagtcatccgcctcagaccttccattcagcgggtaacccgctacaccgcggttgagagcgagattggcggaaaaacgattccggccggagaaaaagtatatgcgtggattggatcggcgaacagagatgaaaagaagtttgaaaatgccgatcagattgacttgggacgaaagccgaatcagcacctgtcattcggtcagggcagccattattgcttaggagcgccgctggcccggcttgaagcgaaaatcgcgctttcccacttttttgaacagatgcccgcatggcgttttactgaggatcaagagccgaatctggttccgagccctgtatttcacggcgttgacaggctgcttgttgagttttgaacgaaaaaataaaagaggcttcgcgggaagcctctttactctgggggcttggagaaatgaatgtaggaatcgaagcaatgaacgtgtttggcggaaccgcgtatgtagacgtcatggagcttgcggaacatcggaacctggataaaaaaaggtttgagaacctgctgatgaaagaaaaagtggtggcgcttccgtttgaagatccgattacgttcgccgtaaatgccgcaaaaccgattatcgattctctgtcagaagaggaacggaatcagattgaaatggtcattacctgtacggaatccgggattgattttggcaaatccatcagtacatatgtccatgattatttgcagctgaagcggaattgccggttatttgaggtgaagcaggcttgctattctttaacggccgggtttcaaatgggcgtgaatttcatcttgtcgcaaacatcgccgggagcgaaagcgctcatcatcggaacggatatttcccgctttttagtggctgaaggcggtgacgcgttgacggaggaatggtcctatgccgaaccgagtgcgggggcgggagctgtcgcgcttttagtcagcagcactcctcatgtctttttgcttgatcaaggtgcaagcgggtattacgggtatgaagtcatggatacctgccgcccgattccggatagtgaagcgggggatgctgatctgtcgctcatgtcttatttggattgctgtgaaaattcatttcaggaataccgaaagcgtgtgagcggggcggattataagaatacatttcaatacctttcttttcatactccgtttggcggaatggtaaaaggagcgcatcggacgatgatgagaaaattggcaaaggctaagccgcaggacattgaagcggattttcagcaacgcgtgctgcctgggattcaatactgtcagcgcgtcggcaacatcatgggggccaccgtatttttatctcttgccagcacgattgataacggctcttttgaaacgccgaaacgcgtcggctgtttttcatacggttcgggctgctgctctgaattttacagcggtgtcgttatgccgcaaagccgtgcgcggcagaatcaatttcagatcagccggcatttggatggacgcgtccgtttatcgatgactgattatgaccggctgctccaagacagcggcatcgtaaaattcggcacaagaaatgccgcgcccgcagcagacatcccgaatgcgcatcaaggaaaaacgcgattagtgctgactgaaataaaagagtttcacagaaagtatgaatggacgacctagtataagagccggaaaggcttgagtatttttaaagaaacggagaatacacatgaatccaatgattgatgtacaggaaacagaaccgggcattgtgcaggtcacaatgcaggatacggccgggaaaaacgggctgtcagaagagtttgtaagagagctgcaccgggtattccaagacatcaatgcccatccgtcctataaaactgtccttctgacgggttacggaaattatttctgcacgggaggaacgcaggaggggcttttgaccattcagagcggaaagcttcaatttacagatttaaagcttcacagtcttttattggattgcaggatccctgtgatttccgtcatgcaggggcatgccatcggagctggctttacgatcggtctgagctcggatttcgtcattttaagcagagagagtttttattcttgtaattatatgaagtacggatttacaccgggaatgggcgcgacgtatattgtgcctgaaaaactgggaattgtcctcggggaagaaatgctgtttacggccgcgaatttcagcggcgccgctctggaaaaacggggtgttccgtttgaagtgctgccgaaaaaagacgcccttcaaagaggccgcgaattggcccggctgctggcggataaaccgagagcctcactggttgcgctgaaaaccaatgtgaccgcacggatcaaaagagagctgacaaaagcggttgaggaagaggtaaacatgcacgaagccacattccatcttcctgaagtaaaagagagaatcagccgcttatacggcagttaaacagaatgaaaaaagcatgggatgcccccatgctttatgactggtccgtcttttgcagaacggagcctgcgaattgttctttaatttcggcgctccgggctgcggtttctgcgatgcagtgcatgatggcttcttcaaagcggcgctcgtctaatgcgcgaaggcctgcttcagtcgtgccgcccgggcttgtgatttccttacgcaggcgttcaggccgtttgctgcttgttctgagcatttccgtcgccccggccatggtttgtaaaatcagctcttttgccgtttcttccggcaggccggcttgaagggcggccttttccatcgcttccacataccggtacacataggcgggaccgcttccggcaatggctgtgacggcatcaaggtgtttttcttcaaagagcgtcgcttctccgattgtttccagaagctcttttgccgtccggatttcagcttcactcgcctcggagcttgcggaaaaaccggtcgccgattgctgaatggccgcggatgtattcggcatcgcccggatgatggtgagctttctgccgaaatattgctgaatcgtgtgaatcgtcagccccgcgatgacagaaatcacaagctgatctttcacgtattcgcgaatgttctcaatgctttctgccgcatctttcggtttaaaggcgagaacaataatgtcggtattgctgaaaaactcttctttatcccggcacggtttcactccgtacgttttttggagctcttcaagccggctgtcatttgaccggtttgtcatatatatatgtccgggggctgtcattccgctttgcagcagtccgttcaccattgcttccgccattgatccggccccgataaaaccgattttcttcatataaatcctccttcttctaaaacacaaaaaaaccttcccgtcaaaaaggacgaaaaggtttcgcggtaccaccttacattagcacgaatcagccgtgctcagctcaaatcccgtaacgagggatacgtttaggttttcctaaccgctctgagggcaggttctgtaaacaagagggccgcaatgtctttcagccggggacattgctctctgctgccgttgtttatatactagttcctcgtcatcgcgttccgtgttttctagtttgttgttcattatgctatgcgaaagagcgggatgtcaatctttttttccgatatgcgcaataatgacacagtgaaaagaaaacgctaaaatatgattattcaggaatgaaaagaacgaaggagcgtaaacatggcagcgagaaagatcattccgatacgtgtgccgactccgtttgcagtcggcgacgttatcgtttatttaataaaagatgaagccttaacccttattgactgcggcccgaatacaaaggaagcggctgaatcgctctcatttcagcttaaggaacacggcgtttctgcggcggatatagaacaggtggtgctcactcatcatcacgcagatcattcaggtctgctgcaccttttttccgaggatacggaagtgatcgggcatccgctgaatgacaggtacattactcaggatcagtcgtatatcgcccggcaggaggacttttttctgtcgcttatgactgaaatgggcgttcccctgacgcctgaagacatacagaaaacagttaagctgtcgtacttattttctgcaaaccgtctgttaacgaaaacagtggaagaaggcgggaaaatcgacgggcttaacggctggacggtgctcgaaatcccgggtcatgccgcttctcacattgcgctctaccatgaaaaaagcggtgaaatgttcagcggcgatctgcttttgtccaacagctccaccaatccgattctggaagctccggaaaaggggggcgtgcgcgcggccccgatgctcgactacttgaactcaatgaagcggctgtatgacgtaaacccgtcccttttatatccgggacacggcgatctgctgacggacgtaaagcctgcttttgacaggcggcttgaaaaacagagaaaccggtcggaatatgtgctgcgcctgttgtcagaggaaacgctgacggctttccaggtatgccggcggctgtttccggctgtgtatgaaaatgaattgtttttaatgatgtcagaaacgatcggccatcttgacgtactggctgcaaaaggggaggctgaatcctttcagtcgggaaatactctgatgtttaaagctgtgaaggggtgaaggaaatgggcagattaacggataagcggatttggatcaccggagcatccggcggactcggagaacggcttgcatattcctgcgcggcagaaggggctcatgtttttttatccgccaggcgggaggaccgcttgcaggaagtgaaaaaaacgattaccgcgcgcggcggacagtgtgatgtcattccgtttgacgtccggcatgcagaagaggctgaaaacgtaaggcgtttgatcggtcatgttgacgtattaatcaacaacgccggcttcggtatttttgaaacagccgctgattcatctttggaggatatgaaggcaatgtttgaagtgaacgtcttcggattaatcgcctgtacgaaggcctgtcttccggtgatgcttcatgcgaaaagcggccatattatcaatatcgcctcacaggccggcaaattggcgacgccgaaatcaagcctttattccgctacgaaacacgccgttttagggtattccaatgcgctgcggcttgagctggccggtacgggtgtagccgtgacaacggttaatcccggtccgatcaaaacagacttctttacaattgcagataaagagggcggttatgtgaaaagcgtcggcagatggatgcttgatgccgaccatgtggcagagcgtattacatccgtaattctgacggataaacgggaaatgaatcttccgcgatggatgagcctcgggacgaagctgtatcagcttttcccttcgtttacagaaaaactggccggccgcgcattaaagaaaaagtaacaagggggagaaaggaatgtccgacctggatatacacaaggcattgatgacagagcctttagtcaggcaaatggcagaggcgcgtgaagtattttggatcaacccgcataaaaccgatgatccagtaaagaatggcgctgaatggagaaaggagattgccgaagcggaagaaaggctgcgccggtttgcgccttatatcgcgtcggcttttccggagacggaagcggcgggaggcctcattgagtctccgcttgtcttcatcaatgaaatgaaaaagcgtctggaacaaagcgccgctcaggctttccccgggcgtctgcttttgaaatgcgacaatgaacttccgatttccggttctattaaagcgcgcggcgggatttatgaagtgctgaagcatgctgaagatctcgctttaaaagcgggaatgctctcaacagacgatgattacagcatattgactgaggaacggtttaccgcttttttctcaaaatactctatagccgtcggttctacgggcaatttaggtctgagtatcggcataatcggcgcgaagctcggcttttgtgtgaccgttcatatgtccagtgacgcaaagcagtggaaaaaggagctgctccgggaaaagggggttcgcgtcatcgaatatgaagcagactacagtctggctgtcaaagaggggcgcatgcaggcgaagcaggacccttattgttattttattgatgatgagcattcccgggatctgtttctggggtatgccgttgcgggaagccgtgtgaaaaagcagctcgatcaaatgaacataaagccgggtgcagatgaaccgcttttcgtttatttgccgtgcggggtcggaggaggcccgggcggcgtcgcgcttgcgctaaagctgatctatggcgggcatgtccatatttttttcggtgagccgacgcattcaccctgtatgctgttaggactgttttccggcttgcatgacggaatcagcgtgcaggatatcggccttgataatcaaacagccgccgacggacttgcggtaggaaggccgtccggactggccggccctctgatggagcctgtactcagcggctgttataccgctgatgacggcacgcttttttcactgctttatcaattaagagcggccgagaataagagccttgaaccctctgcactcgccggtatggccggagccgtcaagttcgttcagaccgaagccggtaaccgttatataaaagagcgggggcttgagatggaaaatgccgtgcaccttgtgtggggtaccggcggaagcatggttcccaaggaggaaatggaagagtacagccggatcggttcctcatttgtgaaaaaaatgggcagacagtgaggcggttttccgttacaatctttgtaagcgtttgttttttaatcggaaagccatacagagagattggtgtgaattgtgaaaagtaaagaattgaacttacatacattgtatacgcagcacagccgcgagtcgtgggccggattcggcggccatctttccattgccgtttcggaggaagaagccaaggccgtagaggggctgaatgactacctgtcggtggaagaagtagaaacgatttatattccgcttgtgcgactgctccatcttcatgtcacgtctgccgcaagacggaatcagcatgtcaacgtgtttctgaaacatccgcattcagcgaaaatcccgtttatcatcggaatcgcgggcagcgtcgccgtcggcaaaagcacgacggcgagaattttgcaaaagcttctttcccgtctgccggacaggccgaaggtgagcctggtgacaaccgacggtttcttgtatccgacggcggaattaaaaaagaaaaaccttctgtccagaaagggatttccggaaagttacgacgtgaaagcgctgcttgagtttctgaacgatataaagtcagggaaagagagagtggaggcgcccgtatactcccaccttacctatgacagggaagagggtgccgtcgaggttgtcgaaggtgcggatatcgttattatcgaaggaatcaatgtcctgcagtcgccgaccttagaggacgacagggaagatccgcggatttttgtatcggatttctttgatttttcgatctatgtggatgccgaagaaagccggattttcacgtggtatttggagcgtttccgcctcttaagagaaaccgcttttcaagatccggcttcttattttcataaatttaaggatttgtctgatgcagaagcggataccatggccgcctccatctgggagagcgtcaaccgtccgaatctgtatgaaaatatcctgccgacaaaattcagatcggatttgattttgaggaaaggtgacggccataaagttgaagaggtgctggtaaggcgggtgtgatgtgaggaggaagcgaatattatgatgcatcatattgaattgtatgtatctgacttgaaagcctccgcccggttttggggatggtttttaggtgagctcggttatagggagtttcaaaattgggactccggcatcagctggaaaaacgccggattttatgttgtgcttgtacagacagaggagcgttttttaacaccggagtaccacagatgccgggtcgggctgaaccatctggcttttcatgctgcgtcaagagagcaggttgacgggatgacggaaaagctgcttgccagaggatgccccgtgctttacagggaccgccatccatatgcaggcggaagcacgcattacgccgtatacacggaggacccggatcggataaaggtggagctggctgcgcctgcttctgaatgaactataacttctcgtttttttcttcgcgcagcgcgtcgagtttcttttcgattctgtccaattgtatgcggcgctgcttcaagcttctgaatacgtatatcacggcaaacaggaaaaatgcggctgcaataaatgagatcaattgaaaaatgacatcaccgatgttcatcttttttacctccgtgtgcggcgggcttcttcagcccgccgttttttcattttaaccgatgtgaagacatgggggatgaatcatttctctcctagctttgtttctttctgagaatgaatagtttctgcatatggcttatgatcacttttgcggccgcatatcccggaatggccagcagcatcccggcaattcctgagaatttgccggcggcaagcagaagaaaaataatggtcagcgggtgaatgtccagcttccgtcccataatttgcggggaaatcagctggctttcaagctgctggacaatgacgacgaccgtaatcaccagcaccgcctcggtcggtgaatcgaacaatccgacaatgactccgggaaatgtgccgatccaaggcccgataaacggaatcagatttgtcaccatggcgaacgcgcccagaacgagcggataatcgagcccgatgataaaatagccgattgtgacgagaacgccgacacagaaactgacgagcagctgtccttgtatgtatgaactgagagcttcatccatatcccgcaggatttgttttccttctttttgatgtttttccggaagaagccgcagcagtcgccgggggctttatttccttcttttaacatgtaatacagcgcaaacggaataatggctgcggtgatggcggcattggcagccgtaccggccagactgctgagagaatcagcgattgaaccggaataatttgcggctttgtccgctaattttttaaaggaatccccatgctgaagcctggaaaaccatttgctgtcctgaagatgcccgatccaattttcagcttttgcggaaagctccggaatatggtctgtgaaggctgtaaactgtttttgaacggcagggcccgccgtataaaggaagaggacaaaaaggccggctgttcccgcataaatcgctaaaatcgcgattccttggggcagctttaatttcgcatgcagcactctgacgagcgggcggcacaaatagtaaaggacacccgataatacaatgggcggaaacaaggttttaaccgtaatcacaacaggctggaacaaaaagtctattaatgttccgagataaatgatgagaaataacagaagaacggcatagccgatcttgaaataaggcccgacaggcatatcctgcaccacgcaatctttagggtttactctcggacgtttcccttttcgcccggtgcataaacgtccgtgtcaggaaaactgcccctgattggtgacgtaatcgtagataatatcttctacatgggcatggagatcctcatcgggttcttcattccttctttcttctaaagctttttttaaactctgtttttcataggggctcagcggatctgtcgacacattccgtccatactggcggagggcttgtcccagcattttttctataaattgatccatcatatattctcctattcttgtcattcatctttattctactaaatatcatgtgatcctcccactcttctatcatattttctgtcaggacgatttaggcttttattccagttcagccgagagaataagatgaaacggcagcgttaacgcatcttcatcgtttatgatttttaaacgtttttcgtcatgcctcacttgtttcacccatccccaaaagcggcgggggccgcgtgctgaagcataggtgaccgagatggctctgtcttcttcaatcgacgccgcaatgatgcggttcatgtcgttcagttgctctgcgctcagttccggaggccggaattcccgttcttttcgtttttttgcaagcagctgctcccgatgttcgggcagcatcatccggcttgattcccacatgacattatacccgggtgttaatttgttcggattcatgtatatcacctcaattatttgtaatgcccgccgattttttcagcccggtgaaaggcttggccggcctctgtcagcgaagcggcatggaggagcgacgcagggccgtaccgctcatgaatatcatccaatactttgccgagactgatctttttttcctgagcatcaaacaggctcagctgaacataatcacagggctccagctgggaaagggagacgccggcgctgcggacgggctcaccgttccaatgctctttgaagagcttgaccgccgctttaaaaatatccattccgaaattagtcggagagaccagctttctctgtctgtgaaaacctgaagggaattcaaaatcagcgcctctgatgctgaccgaaaccgtatggccgatgtattgtttgaaacgggcgcggcgggccacttcttcgcttaactccaacagcacgactttgatatcctcaaagcggctgtagtctctcgggagggtcatgttatggccgatcgctttttgccggctgtgcgtgttgacggtgaccggagagggatcgatgccgcgggctgtccgctgaagcaattcgccgttaatgccccagcgttttttcagcagttcggcggggtgcccggcaagcccgccgattgtgctgatgcccatccgtcttaaatgatgctccatccgttttccgatgccgaataattttccgaccggcagcggccacagatcctccctgatatttgacatatccaatctgtggatgccggatgcgttttttttggcaaaatggtcgcaagccattttcgcgagcgccttattcggcccgatgccgacacgggcataaattccgaattcacgcataatcgcttgctgaatgctttcggcaattgtaaaaggatcaccgaacagccgcctgcttccggtcacgtcgagaaactgctcatcgatggagtagggttctacaagatcggtataccgttcaaacagttcggtaatcatgacggatacatcaatatactgctgcatccgcggacggacaataacggcgtcgggacatttggcctgcgcttcccacagccgttcggcattttttacgccgtatcgtttggcgagcggacaagccgcaagcacgacgccgctgcgtctttcgggatctcccgagacaatcacgggccggcttttgagatgaggcgcttccgctttttccacagacgcataaaacgattgcatatcaacaagaagaatatcagccataaaaaaacctccgggaacgtttgttctgtttttcattgtacccgaacaatgatcacgtttatactggtaaatcattccccggctggaagacgtgctgattcgtttgcttgaaaagaaatcatttacaattgcaaacaacccacatataattttttatattccaatgagaagagctgacattcattttgccggacgaaaaggagagtcaatcgataatggatattcgaacaattacctctgaagactatgaaatggttacgtctgttttgaatgaatggtggggcggcaggcagatgaaagacaaactgccgcgcttgttttttgaacattttcaggacacgagctttatcacgtacgggccggagggaatgaccggttttttaatcggttttcagtcacaatcagaccctgagacagcctacattcatttttccggtgtgcatccggatttcagaaaaatgcaaattggaaaacagctctacgatcgatttatggagacggtgaaaaaaaggggctgcacaaaagtcaattgcgtgacggcgcccgtgaataaagtatcaatcgcttatcatacaaaattaggctttgaagttgaaaaaggaaccaaaaccgtaaacggaatccctgtttttgcgaattatgacggtccgggagaagacagaattctgtttgtgaaatatatgtagagggggatgaatatgggttttttagctgacacgcccaaaccgccctattatgcggtcattttttcatcaataaagggaaaatatgatgaggaatatgagcatacggcagagcgcatgatgaatttggcaggcggacagccgggctttttaggcgcggaaagcgttcgggaggaaaacggctgcggcatcacggtttcctactgggacagcctggaggcgattaaaaggtggaaagaccatactgaccaccgggcggcaaaacaaaaaggaaaaagcgcctggtatgaagcgtacgcggtccgcattacgaagacggagtcacagcggatgtttgcgtcaaaaggggcggaagattgattacatttttacggcatacacaagaacagacggcgcgggaaattgcggcggttcaacgctgctcttatcaaaaagaagccgagctgatcggctttttcggcattccagccctgcatgaaacacccggtgacatacagcggtcacgggagacgtttgccggtttcagagaaaaagatcggcttgcaggcgtcatttcgtatgaaaaaaaaggatatgaccttgtcatatgcaggctgacggtgcacccgtccggctttcggaaaggaatcggacgggcgcttattcaatttgtgatcgaccaaaaccgggacgcccaaaaaatagaggcggctaccgccagtcaaaacgttccggcagtctctctctatttaaaaaccggcttcacagaagccggacagacagagacgccggaagggctgaccctctcgttttttcatctttatccgaagaggaaagcggaagttgttccgtacaagccggaatggaaagagatgtttgaaagagagaaggcggacttgatccgaatcttcggccccgcacttcattctgtcagccatatcggcagcacctccatcccgggaatggccgcaaaacccgttatcgatatactggcggaggtcaaagatatttcagatgctgaccgattcagcccgcagctggaagcactcggctatgaggcgcaaggggaaaacgggatagagggccggcgtttctttcaaaaaggcggcagcaagcgcacacaccacgtccacatatacgaaacaggccatccggatgtgaagcgccatctgctgttccgggattacctcactgaaaagcctgaaaaagcggctcaatacatggaactgaaacggcggctcgctaaggcatacccgtacgatacggcaaagtatagtgaagggaaaaatgactggatcaaggcggctgaacaagaggcaaaggactgggagagcgggcttctgtaaagaaagcagaaacaatgcatacagcggctcggtatgctacaatggcgaaaatgaaaaacggaggatcatctatgcaaatacatgtgacggatgcggcgaaacacacacttcagcaggcgatggacgccaacccggggaaaaaagcgcagctccgctatgacgcagaaggctgcgggtgcgcggtgagcggcgtgccgaccatctggctggcggacgaattaacgggacaatgcgaagccattgaaaccaacggacttccgctttacatccagacctcacaaaaagtgttttttgacgaggaaatgacaatcgattacaatgaaaaggcaaaaacgctcgtcttaaaaagcccggcagagatgctgagcccgagaatgagcatattagtaaagcagggagaaacggaaagtgaatcaaaagctgaaagccattaaacagacggcacagcataaaacgtgggtatcctttctgaacaacaaccacccgtacagtctgctgcactggtccatcggaggcgctgaatccgttcagaaggatgtctggctgcttcaggatgagatgaccttcaaagcgcaggagtttacgacaatcgacctcgccattgactggatcggagaaaatatggacgggattaccgacgttttatgacgggaaagcgaaagaaccagcatacgttctttcgcttttttacgtttgcgtcatggtatctaaaaaggtttgaacggctttgcggtagctctccggatttttggtgtacgacatggcatgcccgcccgattcggccagatagagcatcttcggtccgcgttttctgcggtgcagcaattcggaagaagcgggaggtatataatcatcttccttactgtgaataaacagcacgggctgccggtcggctgataaccgatagaggcgatacatcacggatacggtatccttctctcatccgcaaaaagaaatcagccaaaggcagaagcggccacggaggcagccggaactcccgcttcagtctgtaggcgagctgatcgcgaaagcttgcgaacggacagtccgcaatataaaaatcagcgcctttttcatcctgatgcccgcccgcgtataataaggccgtcaccgctcccatcgattccccgtggatgccgatttgaccgccgtctcccgttttgtgtctcacccaattcacggcttcttccaaatcatctttttcaaaatagccgtagctcgtcgttctgccgccgctttttccgtgcccgcggtggtcatatacgagcacattccagcctgaatctaaaaataaatccatgtatttcaatgaattgaacgaatttacggtaacgccgtgacaaataatcatggcgtttgccgtatgatgcggggcgacgtaaaagcctttgatctcatacccgtggcgtgacaggatgacggcctcttctttttccatggcctgaaaggaatcaaatctatcatgcccgtccgccgtttcttttttcatgatatcttcatccgtctttttcttcataaacataatgagattcgtaaaagcgaatccggcagccaaaaagactgcgcaagccgaaccgaacaccgccagccattttttcacacaggggccctcctttcatatgaaaaatccttcctccggcttttcaggaccgtgaacgttgccggcctccggcgctccgtggtacacttgcttcaccatattcagatacggggggcgtaatgatgaaaaagcagctgcctaaagaaaaacacagcttaaaagacgatctggaggaagatctgaaggccaggcttttgcaaatgaaaagtgagctgaaggaagaagacgagaaaaaacaggcgcagcaaaaagcggaacaaatcagaaagcgaaaagaaaaagaaaaacataaaagctttgaagagctgctgaatgaaagcagtctcgattggcacaaatataaataaaccggcatctgacaaggtgccggttttattgtttaagaacgatgggcttcgtatacgtcccgttttgtatggtattgcagggctttgatttcctggctgcttaaacgccgggcctctgcagccgaacagttttctctcagctgctcaagtgagctggctccggtgatgacagaagcgacggccggctgtgacagtaagtattgaagggaaagctccgtcatgctcaagtcaggtgcggcagcgccgatcgcttttttggtttcttccaattctgcaaaagaatatgttaaatacccgttctcttttacgcttgcggctgcttgatcaagcggtttttccgtaagaagccctttagcgacaggccctctggcgactacgctgattccgttctcctctaaaaggggaagccactcctcaggacgccggtccagcaggctgtattgcatcataacgcttgagatatttgattttttcacatattctttaatgacattcggacgaatcgaggaaatgccgtaataccggatgacgccttcctgttttaagtcctcaaacgcttcgatcgtttcgtcaatatgatcttccatcgtgccgccatgcagctgataaaggtcgatatagtccgttttcagccggcgcagactgtttttgaccgcttcttttatgtatcctttggaggcgtcccaatgccagccgtctttatcatcattccagcggtttccggctttcgtggctaaaatgatgtcgtgcctgcggtttttgacggcctccccgacaatttcctcatttctgccgaaatcataaagatcagcggtatctaaataattgattccaagctcgatcgcttcatccaaaatagacagcgcttcagctttatccgtgcccagcgacatacagccgagcccgatttcgcttatttctaaatcagaatgtcccagtgtgcgttttctcatcgtttcgctcctttttatagtcttttattgaccgtaatataaaggcgcgaagttttcaactgttaaggcccggtgatccaatctccgacatagcggaatgtccgtccgtattctttcagtttagcccgcacttcccacgcctttccgaccaatacgatacttttatccttccggtacaccttcaatcgaaaagcacctccctctcatgcatgtatgataaaatatatgaggcataatagagagacagaacgggagatgacatgatgaaacatttagaagaaaaaacacttgcgaaaaaaaagctgtatgacgggaaagtcatagatctttacttagaggatgtagagctcccgaacggaaaaacaagcaagcgggaaatcgtcaaacatccgggagcggtggccgtacttgcggtgaccgaagaaggaaaaatcattttggtaaaccagttcagaaagccgctggaacggacaatcgttgaaattccggccgggaagcttgaaaagggggaagagccggaacatacggcgttaagagagctcgaggaagaaacgggatatacggcggaaaccttgacgaaaatcaccgctttttatacatcacccgggtttgctgatgaaatcgtgcatctctttcttgcggaagggctttcgccgctggaagaaaagcgcgaactggatgaggatgaatttgtcgaagtcatgcaggtcacgcttgaagaggccgtgaagctgattgaatcccgcagggtgtatgacgcaaaaacggcgtacgcgattcagtatctgcagctgaaagaagcactgaaggaaaaatgatgaaaaccatctatgcggatctgcatattcatatcggccgcacctatacgggaaaaccggtcaaaatcaccggggccaaaacgttgacgctgcatcggattttagaagaggccagtgaggggaagggaattgaactattgggcatcatcgactgccattccccggaagtcatagaagaaatcgagcgcggaattgatgaaggcagataccgtgagctgaaagaaggcggcatccggtatcggaatacgacgcttctgttgggcagtgagcttgaaatctatgatcacacatgccgcgggccgattcacgttctcgtctttatgccgtctcttgccgaaatgaagatgttttctgagtggctcgcaaaaaggcttaaaaatatccatctcagttcccagcgtatttatgaaaccggtttgaatcttcaaaggaaaacaaaggaattgggcgggctgtttattcccgcccatatgttcaccccgcataaaagcctgtacggaaaaggggtcatatcttctttgacagaagttttcgacccggcgctcattgatgcggcggaactcggattaagctgcgacaccgacatggcttcgcgggtaacggaacttgatccgtatacatttttaacaaattctgatgcgcattccttaggaaaaatcggcagagaatataatgaaatgcttcttaaagaagcgaatttcacggaattttcgctggctttaaaagggaaggacggaagaaaaatcacggcgaattacgggctgaacccgaagctcgggaagtattaccggacggcttgcgaccgctgcggcagcccggttgaaaaaggagcttccgcctgtccggagtgcggggggaaaactatgacaaaaggggtcagtgaacggctggaggaactgagcggcccgaaaaaaagccgcgtgccgcggccgccgtatattcatcaaatcccgctgcagttcattccgggggtcgggccgaaaacgttagacaaactgaagcgggctttcgggacggagatggcgattcttcatcaggcgcaagaagaggaattggcgcatgtcgtccagcctaaaatagcggctgtcattcataaagcgcgcaccgggcagctcgtccttgaggccggggcggagggacgtacggcagaatcaagtcgtaaaagccggattttagcggagctcctcctgcaccttctttttcgtgcggacaaacgcaatcaattcgatgatttcatcctgattcagcggctgtccgtcaacggtcagtgtgccgcggccttgtgcggcgtttgttaattcgatggtctgggtaaacggctccgcctttttttcagtgcgccccagtaaatcgtcgcacgtcgtgtcaaacagatcggcaagcgtgcccagcgcttcgaatgacggacgccggtatcctgattcatacccggcgtacgtgcttttggcgatgccgagacggtcagccgtatattgaagagaccaatttttcttttttctcagttcagttaaacgatctaaattcatattcaaaaccgctccttttcacttgagcaaattatatcatatcgatatgcaaaagtgtacgcgaattgaataataatcacttgattaatttcaatcgtctgtctataatttgattaaaagtatgcgaaaagcgaatgcttaacacatcttgagaaatggatgaagaggtgcagggtatgaaaaaattattgctgttaacaaccggaggaacaatcgcctcagtcgaaggagaaaacgggcttgcacccggggtgaaagcagacgaattgttaacctacgtatcaaaacttgataacgattacacgatggaaacccattcgttaatgaacatcgacagcacaaatatgcagcctgaatactgggccgaaatcgcaaatgctgtcaaagaaaaatatgacgcatatgacgggttcgtcattacgcacgggacagacacaatggcgtatacatcagcggcactgtcttatatgcttcagcatgctgataaaccgatcgtcattacgggttcgcaaattccgattacatttcaaaaaaccgatgccaaaaaaaatatcacggacgcgatccgcttcgcatgtgaaggggtgggcggcgtatacgtcgtatttgacggcagagtcattcaaggcacacgcgccattaaattaagaacgaaaagctatgatgcatttgagagcattaactatccgtatatcgcgtttattaccgaaaacggaattgaatacaacaaacaagtgcacatgccaaaagacgatgcctttacggtcaatacctcactttgcacggacgtgtgcctgctcaagctccacccggggctgaaaccggaaatgtttgacgcattaaagggcatgtacaaagggatcgtcattgaaagctacggcagcggcggcgtgccgtttgaaggaagagacattctcgccaaagtcaatgaaatgattgaaagcggcattgtcgtcgtcattacgacacaatgtcttgaagaaggagaggacatgagcgtctatgaagtcggccgaagagtcaatcaagatctcattatccgctccagaaatatgaacacggaagccatcgtgccgaaattaatgtgggcgctcggccagtctcacaacttggctgaagtcaaaaacattatggagacaccgatcgcagacgacgttgtactgtaaaaacatgactaccacaaagagaaagtagggttttagcatgacaaacgcgcaaaaagaatatcgtcaggaaaaagatttcctcggagaaaaacaaattgaagctgatgtgtattacggaatacaaacgctgcgcgcgaaagaaaactttccgattaccggctaccgcatccacgaagagatgattaatgcgctcgccatcgtcaaaaaagcggcggcgcttgccaacatggatgtaaaacggctgtatgaaggaatcggaaatgcgattgtccaggccgcagacgagattcttgaggggaaatggcatgaccaattcatcgtcgatccgatccaagggggagccggaacgtccatgaacatgaatgccaacgaagtaatcggcaacagggcccttgaaatcatgggccataaaaaaggtgaatacattcacctcagcccgaacacacacgtcaacatgtcccaatcgacgaacgacgtgttcccgacggcaatccatatttccaccttaaaacttttggataagctccttgatacgatggcgcatatgctgagtgtctttaaggataaagcgaaacaatttgattctgtcattaaaatggggcgcacacaccttcaggacgctgtgccgatccgtctcggacaggaatttgaagcatacagccgcgtgctcgagcgtgacataaagcgaattaaacaatcccgccagcatctgtatgaagtcaacatgggggcaacggccgtagggacggggcttaatgccgatccgcgctacatagaacaggttgtaaagcacctggctgacatcagcggactgccgcttgtcggcgccggccatttggttgacgccacacaaaacactgatgcgtatacggaagtttcagccgcgttgaaagtatgcatgatgaacatgtctaaaatcgccaacgatctgcgcttaatggcttcaggtccgcgcgcgggacttgcggaaatttcactgcccgcccgtcagccgggatcatccattatgcctgggaaagtcaaccctgtaatggcagagctgatcaaccaaatcgccttccaggtcatcgggaatgacaatacgatctgcctcgcttcagaagcgggccagctggagcttaacgtaatggagccggtactcgtatttaacctgcttcaatccatcagcatcatgaataacgggttccgttcatttaccgatcattgtctggcgggaattgaagccaacgaaaaacgtctgaagcaatacgtggaaaaaagcgtcggcgtcattacagcggtcaatccgcacctcggctatgaagcggctgcgcgaattgcccgtgaagccatcatgacggggcaatctgtaagagatctttgccttcaaaatgatgtactgacagaagaagaattggatatcattttgaatccgtatgaaatgacaaaaccggggattgccggaaaagatctattagaaaaataaattttaaagcaacaacagccgccttttcacgtttttcagtgaataggcggttgccatacaaagggatgaggcagtatagtataatttgttatatcatttgatgaaagcgttttagcttttttcttctagggggattttcttgtgaaagaggtcagattgccaaatttattggaaattattatcttattattcgggtttttagcacttgtcttatcgttcacagtgtttttagacctgccgatccagctagctctattaatatcctggtttttcgctattattctcggagtcaggctgggatattcatataaagacttgcaggattcgattgtcaccgggatatcaaacggtcttgaagcggtgttgattctcgtttcggtcggtgcgctcatcgggacatggattgccggcggtgttgtgccgacgttaatttattatggtttagagtttattaatcctcatattttccttctggctacactggttatttgttccgttatgtccgttgcgaccggaacatcgtggggaaccgtgggaaccgcggggatcgccatgattgccatcggagagggaatgggtataccgcttccgatcgtagcgggagccgttttgtccggcgcttacttcggagacaagctttcaccgctgtctgacagtacggtgcttgcctccacgctttctaaggtggatgtgctgtcgcacgtcagagcgatgatgtatctgtcaattccgtcctatattattacggccattctatttaccgtaacgggatttatatacggcggaaaaaatattgatctcgacaaagtggaatttttaaaatcttcattgcagaaaacgtttgatattcatatatggatgctcattccggctgttgtcgtcgttgtccttctgattttgaaaaagccgtctatgcccgttattatcatcggtgctttgcttggcgcaatctgggcttccgtctttcagggaatgaattttgccagtgccatcgcgactgcttataatggtttttctattaaaacggacgtcgaatttttaaacggcctgttaaaccgcggaggcattaccggtatgctggatacgttagtcgttatcctgttcggtctcggttttggaggaattcttgagaagctcggcgtattaaaagtgattgtctcaacttttgagaaaaagctgaccacaccgggaaatgtgacgctttcgacattgatcgtcgcccttttaggaaacattttcggctgtgcgatgtacgtgtcattgatcctgacgccgaaaatcatggagaacagttatgataaactgaaacttgacagaagagttttatcccggaacgcagaggtgggcggaacgcttacttcagggatggtgccgtggtctgataacggcatctatatggccggcattctcggcgtatccacattttcatatctgccgttcatgtggctcagttttgtatctatcggactggcaatattgtacggatacacggggaaattcatttggtacacgaaagaaaaatccttgcaatctcaaaaattgggttaggaggttcatttcatgattacaaagcatatgattcggacgttaatgattgaaacgccgactgttcccggaaatctcggaaaagtggcaaccgccatcggagtgatgggcggagatatcggggaagttgaaaccgttaaagtcggcccgaactacacaatgcgcaacatcacggtgcaggccgaaaatgaggagcagctgcaggaaatcattcaagccattgaagctctcggtgaaggcatccggcttcatacagtctcagatgaagtgctctctgctcatgaaggcggcaaaattcaaatgaaaagcaaaatgccgatccggacattggctgagcttggccgtgtttatacaccgggcgtcgccgatgtgtgccgactgattgaaaacgagcctgaaaaagcgtccatctatacgacaatcagcaattctgtcgccattgtcaccgacggcacggcgattctcggcctcggcaatatcggttctgtcgccggaatgcctgtaatggaagggaaagccgcgctttttgaccagctggcgggtatcagcggaattccgattttgcttgatacctctgatccggaagaaattattcgcacggtaaaacatatttctccggggttcagcggaatactgcttgaagatatcggttcgcctcactgctttgacattgaagaccgcctgaaagaagaactggatattccggttatgcacgatgatcagcacggcacggcggtcgtcacgctcgccgccgccatttccgcttgtaaaagcgccggtcttgatttaaaagaagcgaaggtcggacagatcggtctcggcgcggcaggcgtcgccatctgccggatgtttatggcatacggagtcaaagcggtctgcggaacggacaagtcagaagacgcaatgaaccgcctcgctcagtacggaggtcagccgcttggaagcatcaaagatttaatggacacgtgtgacattgtgatcagcaccaccggagttccgggtctcattaaaaaagaggatgtcagaaaaggacatgtcattctggccttatctaatccgaagccggagattgaaccggaagacgcattacaagccggagccgcttatgcagccgacggccgctcggtcaataatgttctcggcttcccggggattttccgcggcgcgctgaacgccaaaagcaagaaaatcgaccatgaaatgcttgtggcggccgcagaagccatcgcctcttgcacaaaacacggcgatctcgtgcctcagcctttggatgcggacgtgcatcaggctgtatcagcagccgtagaacgggccgcggcaggaaaataaacaactcttacagtaccggacatgtgccggtgctgtttttttagatgaataggaaacggaattcttaggcaggctaacagatagcaaaagacggaataaagaggtgtcaatgtggattattttccgctgatccatacaaatatttgggatgctgtgatcggcgtgccggtcgtcttatgcgttacacagctgatcaaagtgttctgccgggttccgggcatattcgttcccacgattgcccttgctgccggaaatgttgtgtctatcgttttcggtcaccatgaacacgtgtatgcggggattttcatgggatttttttacggatacgccgctatggggagctattcatctgccaaaacgtctctgcgcgcttaccggtcgaaacatgagccgtattcatgaacacatcgggatttttttgttatgataaagaaaaggcaaaaaggagcgattggcacatggcgaagagcaaaacgaaaaaaatgcgggagcatctcagaagaaacgggatgcgtgacgcagtcttgtcaagggggacggcgccgcctttcagcacccatgaaagagtgacgaaaactaaaaaagacaggcttgaaagaataaagcataaaaaaaggaacccctatgatcaccggagtgatgacgggggttctttttttatgcccgaatctcgcgcctttctatgatttctctgtcatgttttctcttttctttcatacaatctactaaatcaagtcaatagattagcgggaggaaagcggtatgagaaaacaatcgtacaaagaactgttttttcgccatgtaaaggatcatctgtcactttatatatttgtgttcgtcttgtttttgatgggggtcattttcggggcgatcatcgtcaacagcatgaccatcacgcagaaagaagatttgtattactatttaagcaagtttttcggacagctgtctgacggaaaacatgccggcgcttcagaaatgttttggcaggccgtctttcatgatgtaaaatatttggggctgatgtggattctcggtatttccgtgatcggtcttccggttattttcattatggtgttcttaaaaggaatcgtcgtcggcttcacggtcggttttttagtgaatcaaatggggatgaacgggtttttcctgtcatttatttcggttctgccgcaaaacatcgttctcattccagcatatcttatcatggggacatgctccatcgctttttcactgaaactgatccggcagctgtttgtcaaacgcagccttcatgacgcgccgatccaatggttcggacgctacgccttcgtactgattctcatcgttttcttctcggtcctcgcttcactgctcgaagcgtacatgtctccgctgtttatggaaaagctgtcatcacgcatattttagaattattatcacaaaataatacttttatttatcagtttataataattatagttggaactctgcgcgtattttgttataatgagtcatggaatgcggcgtaggagggaaagacatggaaaaccgtattgatcgaattaaaaagcagctgcactcgtcaagctacaagcttacgccacagcgggaagcaacggtaagagtgctgcttgaaaacgaagaagaccatttaagcgcagaagatgtatacctcctcgtaaaagagaaatctcctgaaattggtctcgctacagtataccgtacattagaattattaacagaattaaaagtcgttgataaaattaacttcggggacggcgtatcccgctacgaccttcgcaaagagggcgcggctcattttcatcaccatttggtgtgcatggagtgcggagccgtcgatgaaattgaagaagatctgcttgaagacgttgaagaagtgattgaacgtgattggaaatttaaaattaaagatcatagattgacttttcacggaatctgccaccgctgccgcggggatgaaacagagtaaaagcctatgaaccttttctgccaggaaagggttttttgctgtttttatgtataaaagcctttgaaattggcataaggtgtactaacagccgccaaagaaagggtcgatcgaaagatgggcagattcctgaaaacagccgcggatacgatcaaagtgtttattctgttcacaggttttaccgcgctgttctattatgctatgatatgggtgaattcagagtatgaaaactatcatcggtacgataaaccggaaggctccgccgtcaaagtggccaaaacggaacatgaggagaaagacggctggttcggccgattgatctttttttaccaaaacggggagtagatcaagagtgaaggatcaaattaaggatttcatccattatgtgagggttgaaagagggctgtccctaaatacgatgatgtcctatgagcgtgatctgaaaagttattctctcttcttaactgaaacccttcagatcacttcatggaatgatgtgacccgtcttcatattattcaatatttaaagcatataaaggactccgggaaatccggcaagacgtctgccaggcatttggcgtcgatccggtcttttcatcaatttctgttaagggaaaaagccgcggataaagatccttcggtacatattgaaacacaaaaaacagagcggacgcttccgaaagtattggcgcttcacgaagttgagcggttattggacacgcctaagcttgacagcccgttcggtctcagggataaagccatgcttgaactgctgtacgcaaccggcatccgggtcagcgagatgatcgagctgaaattatccgacgtccatttgacgatgggatttgtccgctgcttcggaaaagggcggaaagagcggattgtgccgattggtgaagccgcttcccatgcgatagaagcatacattgaaaaagccagagggaaattattaaagaaaaacgtaaccgaagcgctttttctgaatcatcacggcaggcagatcagccgtcagggattctggaaaaacctgaaaaaaatcgcccttgaagcggggattaaaaaagagctgacaccgcacacgctccggcactcttttgcaacgcacctgctcgaaaacggcgcggatctgcgcgccgtgcaggagatgctcggacatgccgatatttccacgacacaaatttatacgcatgtgacgaaaacaaggctgaaggacgtgtacaaacagtatcatccgcgagcttaggagccgctgccagaggggccgcggctttttttgccggattggcggaatacagagaaggttctaattatttgaatcggcattgtcaacaagaatgtaaacggtttatacttgagttgtctgacctctgtaagctacaatggacagatggaagaaaaggaggcttttatgatgtctgaatacaaatataaccgggtatttttaattgtaatggattctgtcggaatcggtgaagcgccggacgccgccgattttaatgatataggcgcaaatacgctcggacatatcgcagagcacatgaacggcttacatatgccccatatggcgcagctcggtctcggactgatcggagacattaagggcgtggaaaaaacggagcaccctcttgcgtactacggaaaaatgcaggaggcgtcaaacgggaaagatacgatgacggggcactgggagattatgggcctctacattgaaaaaccgtttaaagtgttcccggaaggattcccggatgaacttcttcaggaacttgagcggcgttcaggacggaaaatcatcggaaataagccggcttcaggcacggcgattctggacgagctcggaaaagaacatatggaaacgggtgcgctgatcgtttacacatcagcagattccgtgctgcagattgcggctcacgaagatgtcgttccgctggaagagctgtacagcatctgtgaaacggccagagaactgacgcttgatccgaagtacatggtcggccggattatcgcaagaccgttcgtcggagagccgggcagcttcaaacgcacgccgaaccgtcatgattatgcgctcaaaccgttcggccgcacggtaatgaacggaatgaaagacagcggattagacgtcatttccatcggcaaaatttctgatatttatgacggagaaggcattacatcttcccgccgcacggtatctaatatggatggcatggacaaagtgattgaaacgctcggtgaagagtttacgggcctgagctttgccaacctcgttgattttgacgcgctgtacggacaccgccgcgatccggaagggtacggaaaagcgcttgaggaattcgacgcgaggcttccggaagtgtttgaaaaaatgaaagaagacgatctgcttattatcactgcggatcacggcaatgatcctgtccatcacggcacggatcacacgcgggagtatgtgccgcttcttgtttacagcaaaaagcacaaacatacagaacagctgccgcttgcggatacatttgccgatatcggcgcaactattgccgataattttaaaacggaaaagccggaatacggaaaaagctttttatcaagattacagtagggggactttttttgaaacaaaagatcgaacgtgctgctgcatttattaaagaacacgtgaaagaaacaccaaagatcggtctgattttagggtcagggctcggcgtattggccgatgaaattgaaggagctgtcaagcttacatatgaaacgatccctgattttccggtctcaacggtagaaggccatgccggccagcttgtgatgggaacgcttgaaggcgtgcaggtcatcgcgatgcagggccgctttcattactatgaaggctactcaatggatcaggtcacatttccagtccgcgtgatgaaagcgctcggcgttgaatctctcgtcgtgacgaatgcagccggcggtatcaacactgaattccgcgccggcgatctgatgattattacagaccatatcaactttacaggcaccaacccgttaatcgggccgaacgaagctgaattcggagcgagattcccggacatgtcagaagcctatgacaaagagctgtcaagcttggctgaaaaaacggccgatgagctgggcattcctgttcaaaaaggtgtgtatacagctgttacggggccgtcttacgaaacacctgctgaggttcggtttttaagaacgatggggtctgacgctgtcggcatgtcgaccgtgccggaagtcatcgtcgccaaccacgcggggatacgcgtgctcggcatctcatgcatttccaacgcggcggcgggtattcttgaccagccgttatctcatgaagaagtaatggaaatgacggaaaaagtaaaaggcggctttttgaagcttgtcaaagccgtagtcgcacgatctcaaaaataagtcagcataagtcagctgtttcttcggaagcagctgtttttttgtgccctcaacacgaaacattttccagatgaggcgtataaaaccaccggatttggaaaaaataaaaaggattatgaaatggagggctttggagatgaaacgtcttatatccactttgttgattggcattttattaacggcatcagcaccgtccgcttttgcaaagccggacggaaaacatacatcggagctcgctcatgaagccaaaagcgccgtgctgattgaacgcgatacgggaagcattctttataacaagaacagccgggagcgtctggcgccggcaagcatgacaaaaatcatgaccatgcttttaatcatggaagcgcttgacaaagggaaaataaagatgagcgataaagtcaggacgagtgaacacgccgcgtccatgggcggatcacagattttccttgaacccggagaagaaatgacggtaaaagaaatgctcaaaggaattgcgatagcttccggaaatgacgcatctgtcgcaatggcggagtatatcgccggttcagaagaggatttcgtcagccggatgaacaaaaaagcaaaagaattgggattgaaagatacctccttcaaaaacccgacaggactgcctgaaaaagaccattacagctctgcttatgacatggcgaaaatggcgaaggaattattaaagtacgataaaatcactcaatttacgggaacgtatgaggattatttaagagaaaatacagacaaaaagttctggctcgtcaatacaaaccggctgatcaaattttacccgggtgtagacggcgtgaagacgggctttacaggcgaagcgaagtattgtttaaccgccaccgctaaaaaagggaatatgagggtcattgctgtcgttttcggagccagcaccccgaaagaaagaaacgcccaagtgaccaaaatgcttgattacgccttcagccagttcaaaacacacccgctgtacaaacggaatcaaatcgtcggaacggtaaaagtgaaaaaaggaaaacagaaactgatcaagctgaccacatctgagccgatttctcttctggccaaaaagggagagaacatggacaaagtaaaaaaagaagtgaaaatcaacggcaatgtaacggctccggttaaaaaaggagaggtgctcggcagcctcgttctgaaaaaagacggaaaggtgctcgttgaaagcccggtcacggcaaaagacgacatggaaaaagcgggttttctcacttttctgaagcggacgatgggagattggacaaaatttaaataatcatggcgaacgggcactagttttgtcatagtgaaggaattgctttcccgaaaatcgaaacactcattatccgatcatacaaggaggaatgagcatgagccttggaattgactttcatgtcaaagaatccgtgctttgtattcgattaacaggtgaactcgaccatcatacggcagaatcattaaaacaaaaggttactgaatcgctggaggctgacagcatccgtcacattgtgctgaaccttgaagatcttaccttcatggacagctccggcctcggcgtgattttagggcgttataaacaaattaaacagctcggcggagaaatggtcgtgtgcgcgatttcgccagcggtgagacgtctgtttgacatgtccggcctgtttaaaatcatcaggttcgaacaatcggaacaaaaagcgcttttaacgttgggggtggcttcatgaaaaacgagatgcatcttgaattttcagccctcagtcagaacgaatcgtttgcgcgcgtaacggttgcttcttttatcgcgcagcttgacccgacgatggatgagctgacggaaatcaagaccgtcgtatcagaagcggtaacaaacgcaatcatccacggctatgaagaaaactgcgacggaaaggtgtacatctccgttacgctggaggatcatgtcgtctatctgaccatacgtgatgaaggcctcgggatcacggatcttgaggaagcgcgccagccgctctttacgacaaaacccgagcttgagcgctccggaatgggctttaccattatggaaaactttatggatgatgtcacgattgattcctcgccggagatgggaacgacgatacgcttaacaaaacacctatcaaaaagcaaagcgctttgtaattaaggagatttgttatggatgtggaggttaagaaaaacagcaaaaacgcgcagctcaaggaccatgaagtcaaagaattaatcaaaaagagccaagagggcgaccagcaggcaagagacctcctcatagaaaaaaacatgcgtcttgtgtggtccgtcgttcaaaggtttttaaacagaggctatgagccggacgatctgtttcagatcggctgtatcggattattaaaatccgttgataaattcgatttgtcctatgatgtccgtttttcaacttatgccgtgccgatgattatcggagaaatccagcgcttcatccgtgatgacggaaccgtcaaagtatcaagatctttaaaagagctcggcaataaaatacgccgggcgaaagatgaactgtcaaaaacatacggaagagtgccgaccgtccaggaaatcgcggatcatttagaaattgatgcggaggatgtggtgcttgcgcaggaagcggtgcgggcgccttcatccattcatgagaccgtgtatgaaaatgacggagacccgatcaccctgcttgatcagatcgccgatcattcagaagagaagtggtttgacaaaatcgccctcaaggaagcgatcagtgatttggaagaacgggaaaaactcattgtctatctgagatattataaagatcagacacagtcggaagtagccgaacggctcgggatttcccaagtccaggtatcgaggctggagaaaaaaatattaaagcagattaaagtgcagatggatcatacggaaagctgaccttttacgggccggctttttttatttgtgcatcggtggtaatttatggtcttttgcggctgatgaatgagaacaaaagtgaaccacatactacatatataaccacccgaaagatggtgatgcaagatggaaagacgaatatttctcagacttcgccaccgcgtgaaggctcataccggagatatcatcacagtcggcgacgccgcgcagattgcgggacagcaaaagctgaaaaaaaaactgtcggcactgccgctgtataaggtcacgaaaaaagacaaaaatatcgtcgtgctggacatcataaaagtgctgaaaaccattcataccgcttttcccgcgcttgatgtacaggccgtcggcggcgctgaaacgatagtggaaatccattaccagaaaaagcagctgtcagccgttttattcgtcggtgtctggctcctgctttttatcggttcatgtcttgccattatgaattttcatgaagatgtcagtatgagagaagttcatatcgccttatatgaaatcataacgggcgaacggaatgaatacccgtatctgcttcagattccatacagcatcggcctcggtctcggtatgatcgtcttttttaatcacatcttcaaaaaacgcctgaatgaagagccaagcccgctggaagtcgagatgtttaattatcagcttgatctcgatcattatgtcgcaatgcacgaaaatgaagagacgatgaaagatctgcatgatcgttagcattcttttcgttgtatttgtcgggcttggcggagggctgaccgtgggcgcgggctttgtggcttttttaaccgttatgggaatcgtcccccgccttatgcagctgacaaaaacaatgcgctttgtacaggcctacgaaggagcagttatttcaggagctgtgttcggcggctgggaaaccttaaatatgaatcatttttttttatctgaatggctggccgttccggtcgggcttttggccggcatgtttatcggcatgctggccgccgcgcttacagaagtgctgaatgtgcttcccattcttgccaaacggatcggcttcggcagcaaaatcattatattgctgatggccattgtgttcggcaaaatagccggctctttatttcattggctgtattttatccatcattcataaggaggaaccgacgtgacaaacttaaaagaaaattacaaaacaaaagtgaaagactatcagccgaaaccgccatatgtttggaattgcgtcaaagcctttctgatcggcggtttgatctgtctgatcggacaggctcttcaagacttttacatccacttttttaattttaatgaaaaaacagcgggcaacccgacggccgccactcttattttaatttccgcccttttgaccggattcggcatttatgacagactcgggcagtttgccggagcgggttcagccgtgccggtgacgggttttgcaaacagtatgacaagcgcggctctggaacacagaagtgaaggactcgtgctcggagtagcgacaaacatgtttaaattggcgggaaacgtcattgtattcggcgtcgtggcagcctatatcgtaggcctgatacggtttgcttgtgaaaaactgttttcgtaggaggagaaaaaatgaaattaaccggaaagcaaacctgggtgtttgaaaacccgttatttgtaaatgcggcggggacggcagccggaccgaaagaaaaagacggcccgctcggttcgctgtttgataagacatacgatgaaatgcattgcaatcagaaaaactgggaaatggcggaacgtcagttaatggaagatgccatcaactcagctttgcaaaaacagaatttgaaaaagagcgatattgatttgttactcgcgggggatcttttaaatcaaaatgtgaccgccaactacgtcgccagacatctgaaaattccgttcctctgtctgttcggcgcctgttcgacatcaatggaaacgattgccgtcgcatccgcgctcattgacggcggttttgcgaaccgggcgatcgcagccacgagcagccataacgcgacggcagaacggcaattccgcaatccgacggagtatggcgggcaaaaaccggataccgccacttcaacggtcacggggggcggggcggtcatcatcagccaaaacccttctgatatcaagattacaagcgcaacagtgggaaaagtaagcgacctcgggattacggacccgttcgatatgggatccgccatggcgcccgctgccgccgacacaatcaaacagcacctgcaggacttaaaccgcacggcggatgattatgatctgattttaacgggagacctttcaggcgtcggctcgccgatcgtgaaagatttgctcaaagaagaaggctatcccgccggaacgaaacacgatgactgcggtcttctcatctatacgccggaccagcaggtgtttgcgggcggaagcggctgcgcctgctccgcgcttgttacgtacacacatatttttaatcaattaaaatcaggggctctgaacagggtgctcgttgtcgcgacaggagcgcttttaagtccgacaatgatccagcagaaagaaaccattccgaccatcgcgcacggtgtggtatttgagcgggcgggaggtgcatcataaatggaatatctgttggcttttgtttgcgggggaatcatatgcattatcggtcagctgctgcttgacatttttaaactgacacccgcccatgtgatgacaacttttgtcgtcatcggcgccttgttggatgggttcggaatatatgacaaatttatcgaatttgcaggtgcgggcgcgacggttcccattgtcagcttcggtcacagcttattgcacggcgccatgcatcaagctcacgagcatggatttatcgggatcgccatggggatttttgaacttacttccgccggtatatcttcagcgattttattcgcatttcttgtagccattatttttaaaccgaaaggataatgcctgatgacgaaacggaaggtcattcttgtgacagacgggacgtatacgccgccaaaacaattgaatatgccgcggaaaaagcaggcgggcggtgtatttcccaatcaaagggcaatccgtcaaccagaagcggccccgaacttgttcagctgattaaagccgcgccgaatgacccggtgtttgtcatgtttgacgattcaggcctgcaaggggaagggccgggcgaaacggcgctgaaatatgtcgcctcacatcaggacattgaagtgctggggtgattgcggtcgcttctaagacccatcaggctgaatggacgaaagtcgatgtctccattgaccgtgatggagaagtgacggagtatggcgtcgataaaaccggaatgagagaaatggacgagcacagaatgaacggagatacggtgtattgtctggataaattggacgttcctctcattgtgggcatcggcgacataggaaagatggggagaaaagatgacatatccaaaggctcgccgattacgatgaaggcggtcgaattcattttagaaaggagcgaaagtcatgccggaaaaaccggaaaacatgatcaaggtataccgggatcctagaaaaaatgaacaattttttaaagaccgcgtcggtatgggaacgagctatgatgtcggcgtccgcaaagttcgagtattagaccgggaagtccagatttactttgtcaacggattaaccgatactttgtttatcattcatttaatggaacagctcgtcgacgtcaataattatgatgagaatgcggatgaagcgattgacgttgttgaaaacaggcttgtcaatcagcaggtccaaaaagtcaaaacgctcgacgaagcaacagatcaagtgctttccggacttgtggccgttatcgttgaagacgcgggcttcgcctttatcgttgacgtcagaagttaccccggacgcacaccggaagaaccggatacggaaaaggtcgtccgcggggcaagagacggttttatcgaaaatatcgtcattaatacagcattgatcagaagacgaatcagagacgaaaggctccgcgtcaaaattacgaaagtcggcgagcgctctaagaccgatcttgccattgtgtatatagaagacatcgcggacccggaccttgtcagcatcgtcgaaaacgaagtgaatgcgattgacattgacggattgacgatgtctgataaaacagtggaagaattcatcgtcaaacagggctacaacccgtttccgatggtcagatacacggagcggccggatgtggccgccaatcacattttggaagggcacgtcatcatcgtcgttgatacgtcaccgagcgtgatcataacgccgacaacgatttttcaccatgttcagcatgcggaagaatacaggcaggcgccttcagtgggaacatttttaagatggatcaggttcttcggtattatcgcttcaacggttctgcttccgatctggtttctctttgttctcgaaccgtctcttctgcctgaaagattggattttatcggtttaaataaaaatacgcacatcccgatcattctgcaaatctttttagccgatttggggattgagtttctcaggatggccgcgatccatacgccgaccgctttatccaccgccatgggtctgattgcggcggtgctgatcggtcaaatcgccatagcggtggggctgttttcagcagaagtgattctgtatgtatcgatcgccgccatcggatcatttaccacgccgagttatgagctcagcctcgccaataaaatgatacgcctcatcttaatggtgctcgtggccattttccaagtgaaaggctttgtgataggctttacattgctgctgatcataatggcgaatatccgttcgtttcatacgccgtatttatggccgtttttaccgtttaacggcaaggcgctgtggcaggtgctcgtccggacgacagtgccgggagcgaaagtcagaccgagcattgttcacccgaaagaccgtcaaagacagccaagcggttcataatcgcattgaaaccgacagaagattatgatattgtatgtcttaacttatacgggacttgtataaggacagctcaaaagaagctgtccttttcacccataggcggatcagaaagagggaatgagcattgttcttacatggcacaagcagacaaaacaaactaggtcatttggaaatcggaggtgtggacgcgctgtatttagcggagcattacggcacgcctctttatgtttacgatgtggctttaatacgtgagcgcgctaaaagctttaaacaggcattcattgacgcggatttaaaggcgcaggtcgcgtacgcgagcaaggcgttttcttccgttgcgatgatacagctcgctgagcaggaggggctctcattggacgttgtatccggcggagagctgtttacggcggttgcggctggttttccggctgacaggattcattttcacggcaacaacaaaagcaaagaagagttgaaaatggcgctcgatcatcaaatcggctgcatcgtcgttgataatttttatgaaatatccttactcgcggaactgtgccgcaaatcagggcgcacaatggatgtgcttctccggatcactccggggtagaggcccatacgcatgattatattacaacggggcaggaagattccaaattcggttttgatctgcataacgggcaaatagaaaaggcgattgaacaagtattgcagtcagaccatatccgccttctcggcgttcactgccacatcggatcgcaaatttttgatacggcgggctttgtgctggccgcagaaaaaatctttgcaaaactgaatgaatggagagaatcattcggctttgtctctgaagtgctgaatttagggggcggcttcggcatccgctacacggaagaggatgaaccccttcatcccgccgtttatgtggaaaaaattatcgaagcggtaaaagaaaacgcagcgctgcacgcttttgacattccggagatctggattgaaccgggacgctcgctcgtcggagatgccggaacgacgctttataccatcggttcgcaaaaagaagtgcccggcacccgtaaatatgcagcggttgacgggggcatgagcgataatatccgtcctgcgctttatcaggcgaaatatgaagccgtatcggcaaacagaatcggagaacaccacgacaaaacggtatccatcgcgggtaagtgctgtgaaagcggggatatgctcatttgggatatagaccttccggaagtgaaagaaggcgatcttctcgccgttttctgcacgggagcgtacggatacagcatggctaacaactacaaccgtattccgcgtcccgccgtcgtttttgtggaagacggcgaagcgcatcttgtcattagaagagaaacttatgaagacattgtaaaactggatctgccgtttaagactggggtcaaacaataaataaaaaagagaccggaacaatggcgtccggtctctttttgcgttcagctgtcagaacttgatccgctgtctcctgtaaatacagacacgatcgcattccaaatcgaagcgaagaaatcaataactttttgaacaaagcttttgccttcatcggattgaatgaacttcgtgattttgtcttttgccttatcgagctggctgccgacttggccccaatcaatctttgcatttttcattttattaaacaatgaaacgagctggtctttttgagcgtcagtcagtgtaatgttaaggtttgaagccgcatcatcgacctttttctcgattccttcttttgtatcgggcacaccgtttttcgcgaaatcatctttaatgtttgcgataagcgcggaggcgtttttatccccgattttatccccgagatttgaagtggtgacaagctcttggttggcgacctgttttacatcttctgaaatcgctttgtctgatgagacttcatatgccttgatgattcccgttaatgctgcggtgcctgatacctcaaacggcgccgtcacgtatactttcgcatctttcactcctgctgtcatcagggcgtttaagtacatttcatccgtaatggaatcgatattatgggtcttaacgtcaagcccggaccctttctttgccaccgtaatggatgacgaagagatggctcttgtgccgatttgggcattcgatatatattttcccagatattcatgttcttctttatttgtgaccgtcacttttgtcgcgttatcagggacatttaattcgtcaagcactttctgacggttttcgtttgacagatccgcccccagtgtgacgatgacatctccgactgcggcatcggccaggctgattttcggtattgtgcacaatacaacggccgccgccagcaatccaatccacatttttttcaaagcggttaacctccttcttttcacaaatgccgttttgaagcggtttgtgaggacctgcgagaagcagttccgatacatagacggctgtgaagctgttctggtttcattttctttctgcggaagcggggagattcgttttccggctgaaggtgtggtataatagccgcgaaaagaagagcagaggcctcttccttcaaaagaatatcaaaaagaaagccggcttacaattgaaattcatattaaagaaggctttgacaaaaaacaatacggaagtaggaatgagaatgaaaactggttacatcgaaatggaaaacggcagcagaatcgaatttgaactttatccgaatgaagcgcctaatacagtcgctaactttgaaaatctggcgaatacgggcttttatgacggcgttattttccaccgcgtgattccgggctttgtcagccaaggcggagatccgactgggacaggcatgggcggaagcggaaaaacgatcaaatgtgaaacagaaggcaatccgcataaacacgaagccggttctttatcaatggcgcatgccggtaaagacacgggttcaagccaattcttcatcgtacatgagccgcagccgcatttaaacggcgttcatactgtattcggaaaagtgacaagcggtttagagcatgcgaaaaacatgtctaacggagacaaaatgaaagaaatccgtgtagaaggataatgacggaaaacccgcctttttcaggcgggttttttttatgtatatgaaaattctcatgtgtaaatcatgaaaaaatacatatatgaacatcggtgatcattctggtatagtgaaaaagaccgattacaacaatgaaaagaggtagaaacgttggttcaattggcaaccgttttatttgtcattatcattctcgcacttatgatttggttcagggtaaaaaagggaaacaggccgattaaaggcggcggcttaggcatcattctcccgcttttgattatcgccgtcatttttacattcagtatcagccagctcatgaatatcccgggaaagccgtttcattttcccgctctttgggagctcgccatcgccggactgttaggcgcggtattcggtatcatcatgctgtcgcaaaccgcctatgaaatccgggaagacggctttgtctactccaagcggaataaaaactttaaatatgtcattatcgcgattattgcgatccgtatcgcactcagccaatatttcaaaagcattgacgcggctgaattcgccgttttaacgatggagcttgcttttgtgtatttgtgcatttggcggatcggaagcttcgtgaaataccgtaaaatcagcagatccggcttataaaatgaaaaaaagggatggggtgcggggcttatttgccctctgtgcagggattcatggtaaaataaaaatgaccatggctaatgggaggaaatcacttgaaatcagaaaaagaaaaaacttctaaaaaaagcgccgtacttgattgggcgaaagccattatcatcgctgtcgttctggcactgctcatccgaaactttttatttgccccttatctcgttgatggtagatcaatggatccgacgctgcatgaccgcgagagaatctttgtcaatatgacggtcaaatacataagcgacttcaaacgcgaccagatcgtcgtgctgaacggagaaaatgagcactatgtcaaacggattatcggacttcccggcgacacggtgcaaatgaaaaacgatcagctgtatatcaacggcaaaaaagtgtccgaaccgtatttagcggcaaataagcacaaggcgaagcaagacggctatgaccggctgacagaagacttcggcccggtgaaagtgccggacgacaaatatttcgtcatgggtgataaccgcagagaatctatggacagccgcaacggcctcggtctttttacaaaaaaacaaatagcgggcacatcaaaattcgtcttcttcccgtttaacgaaattcgcaagacgaaataaaccgtacaggcagttttcttcatgagaaaactgctttttttatataaatttatctctccaccctcaaaaacagaacataaattcgtatatctatttaatagatagaaagttttacagatacatgaaacatcttccctttatgaaacgttatatgaataactcacgcagggaagaacggttttctattcatgaaaaaaaggaatatgacatagtaatgaatagattgatacgggctggaggtagaaaaatgggaagaattaaaacaaaagcagccattttacttgtactgctgctgttattagcgggcggttatatggtcataaacgatattgaactgaaagacgtgccgactgcaatcggacaaaccctgtcccaggaaaaagaagaatatacagtcaaaacatataaaattacgaaaatcgaaggaactgagtaccacggtacggcagcgaacggcacaaaaattatttttaacggcgacaagctgaagcaggatctctccgatgtgcaaaaaggtgataagattaaagcgtatttcagcaaatcaaaccggattgacggcttattgaaggtcgtcaaagtgaacgaataaataaagacgccttttatgggaaaagggcgctttttatttttctgaataatgaggtgcaaattcattgcgcctgccgcaaaggatgttataatagcggataaggacaaaaaaatattgattgtatccttcggggctgggtgaaaatcccgaccggcggtaataaggcgctttgcgctttacagcccgtgacccgtatgcatctgtatacggtggattcagtgaaaagctgaagccgacagtgaaagtctggatgggagaaggatgagagaagctatgcaaaaaataaacttactgtatagtcttatttcctatggattaaaactggcaaagccccgaactgtgtaaacattcggggcttttttgacgccaaattgcgtggaagaagggagggataacaatggatgaatattatatgaatacggcaatagaacttgccagacgcggtgaaggacagacacagtccaatcctcttgtcggcgctgtcgtcgtcaaaaacggacagatcgtcggaatgggcgcccatttgcaatacggagaagcgcatgccgaggttcacgcgattaatatggccggcagacacgcaaaaggcgccgatttgtatgtgacgctggagccttgcagccattacggaaaaacaccgccatgcgccgaactgataataaagtcggggataaaaagggtgttcattgctgtgaaagatccgaatccgcttgtagccggaaaaggcatcggaatgctggaagcagcgggcatcgaagtgaaaaccggccttctcaggcagcaggcagaagagctgaataaaatgtttcttcacttcatgcggaccggacttccgtatgtcaccttgaaagcggccgcgagccttgacgggaaaacagcgaccgaaaccggtgacagcaaatggattacatcagaggcggcaaggcttgatgcccagcaatacaggaaatcgcatcaaagcattcttgtcggagcaggcacagtcaaagccgataatccgagcctgacctgcaggcttcctgatgcggtgaagcagccggtcagagtgattctcgatacaaagctgaccattcctgaaacggcaaatgtgctcactgacggcgctgcgccgacatggatatttacggccaaaggtgcagacgtgcaaaagaaagaccggctgaccgcactcggaataaaagtttttccgctggaaacagaccgcattcacatccctgaggtgctcagtgttctcgctgaaaacggaataatgtccgtttatgtggaaggcggagcatccgtacacggaagttttgtgaaggaaggctgtttccaagagcttcatttctatttcgcccctaaattaatcggaggaacgcttgctcccagcttgatctccggtgaaggttttcaatcaatgaaagatgtcccccatttgcaattcacacaaatcacccaaatcgggccggatataaaactgacggccatacctaaagatggaaaggatggtgacgatgtttacaggaatcgttgaagaaacaggcacgatccaagcaatcgaaaagacaggcctttccatggcattaaccatcgccgcttcaaaagtgacaagtgatgtgaaacttggcgacagcattgcggtaaacggcatctgcctgaccgtaaccggattttctgacaatcaatttacggttgatgtcatgccggaaacagtgaaatccacttcgctgaacggcttgtcaaaaggcagtaaagtaaacctggaaagagcgatgtccgccaacggacggttcggcggccactttgtatcagggcatgtggacggaacggcggaaattacgcggatcgagaaaaaaagcaacgcggtctattacgatttaaaactttcgccggaattgacaaaaacgctcgtattgaaaggttcaattacggtagacggcgtgagcctgacgattttcggtctatcagatgaaagcgtgacggtatccatcattccgcataccatctcagaaacgatttttcagacgaaaacagtcggatcgaccgtaaatattgagtgtgacatgatcggcaaatacttataccgctttttgcacaaaacagaacaaacgaaaagcaatcaaactatcacggaagcctttttaagcgagaacggcttttagaaaggaagatcgatatgtttcatccgatagaagaggcgttagaggcgctgaaaaaaggtgaagtcatcattgttgtcgatgatgaagacagagaaaacgaaggagatttcgtagcgctggctgagcatgccacgcctgaagtggtgaattttatggcgacccatgggagaggtctgatctgcacgccgctgtctgaagacatcgccggccggctggatcttcacccgatggtcgatcataatacggactcacatgagaccgcctttacggtcagtattgaccacaggctgacaaaaacgggcatcagcgctcaagaacgttcttttaccattcaggcgctgttgaacgaggaatctgtgtctgacgattttcagcgtccgggccacattttccccttaatcgcaaaaaaaggaggcgtcctgaagcgggcgggccatacggaagcagccgttgaccttgcaaaagcctgcggatctcagggagcgggcgtcatttgtgaaattatgaatgaagacggcacaatggccagagtgccggagttagccgaaatcgccgaacgtcaccagctgaaaatgattacgataaaagacttaatagagtaccgttacaacattacgacacttgtgaacagagaagttgatattacgctgccgactgacttcggcacgtttagagtttacggatatacaaacgaggttgacggaaaagaacatctcgcctttgtcatgggggatgtcccgtttaacagcgaacccgttcttgtcagagtgcactcagaatgcctgacgggcgatgtgtttgcatcccatcgctgtgattgcggacctcagcttcatgccgcgcttgcgcaaattgctgaagaaggccgcggcgttctattgtatttgcgccaggaaggcagaggaatcggtttaatcaataagctgaaggcgtaccgattgcaggaacaagggtacgacacggttgaagcgaacgaagcgctcggctttctgcctgatctgcgcaactacggcatcggcgcccagattctccgcgacttaggggttcagcatatgaaacttttaaccaataacccccggaaaatcgccggcctcgaaggatacggtctcagcatttcggaacgggtgccgcttcaaatggaagcgagtgagcataacaagcagtatttacagaccaaaatgaaaaaacttggacatctgcttcatttctaaaaacaaatctcacaaaaaaggatggataacatatgaatatcatacaaggaaacctagtaggaacaggacttaaaatcggaatcgtcgtcggcagatttaatgaatttataacgagcaagctgttaagcggagcggaagacacgctgcttcgccacggtgtagaatcaaacgacattgacgtcgcttgggtgccgggagcgtttgaaatcccgtttgcggcaaagaaaatggcggaaacgaaaaaatacgatgccgtcattacgctcggcacggttatcagaggagcgacaacgcattatgactatgtctgcaatgaagcggcaaaaggcatcgcccaggcgggaacggcgacgggcgtcccggttatcttcggcatcgtgacgactgaaaccattgagcaggccatcgaacgagccggaacaaaagccggaaataagggagcggattgcgcagtatctgccattgaaatggcaaatttaaaccgttcatttgaataatttgttgaaaagcgtttaaaaccgcggcgaaaatgatataatgtgagaaaacggatcgcctttatgtatccgtttgataggacatgaatggacattttggatatagaggggtttttatgttaattcgttataaaaaatcgtttgaaaagattgcgatgggtcttctgtcatttatgccgaatgaaaaagatctcaagcagcttcagcagacaataaaggactatgaaacggatactggccgccagctctttctttggaaagaggatgaagatatcgtcggagcgatcggagtcgaaaaaaaggactcagaggttgaaatccggcatatcagcgtgaatccttctcaccgccatcaaggaatcggaaagcaaatgatggacgccttaaaacgtctgttcaaaacggaggcactcgttccgaatgaattaacgcaaagcttttttgaacgctgtcaacatcaaaaagatcaggatatctcatataataactgacaaatgctcccggaatcttcacggtttcgggagctgttttgatatagaaaaagcagggctgaccgtcagcctctgcttttttttcttctctcaatttcccgttcgcgttccttaatgacatccgtcctgtcccgcaggcggtgtttatgaataagaaaggtatctgatacgccgtcttgcccccatgtatagccctttcggcggcattcggcaagacatgcttctttcagggcttcatctgtaatcggaagcataacacttctgtaaggcaggcccgcttctatatcgtctgacagcgtttctatcagctcaatcagcttcggatggctgagaccgagagaacagaccgcctgcttttcagaccggagaatacgtaagctgttggcaatcagccgtttcgccccggcttcatttcccctgcgctggtgatacagagcgacggcaagctgaatcaggccgacccaatgaatgctccgcttttcagccgggctttctttccaatattcctctaacagttcatgacattcaaaataatctcttgatgcgtgaaattcggccaaaaagccgatataagctttaggatacaagccgcttcctccttttatgctaaaaccagtgtaccacagcgctttgaaaaggaaaaaagagcggcttggtgtctgaagcctgaggaactagcagatgtaagatgctcctacgacaacgagcaaaataaacagaacgacaattaatgcaaaacctccgccgaaacaagctccgctcatgtgaaatcagcctccctttgtttcaagtttacacggctatcctatgtgcatccgcctttaaaggtataggcgtatatcttctttttcagtattttctaaataacggaggacgtgtataaaagtattggacgagagcatttcggtggattatactaaagggtagccagtttttccggcaatgagagtgatactgaaaatggtgagataatggtagaatatcaagtgaaaattgatacgtttgaaggcccattggacctgctgcttcatctgattaaccgtcttgaaatcgacatatatgacatacccgtggcaaccattactgaacaatatttattatatgtacatacaatgcaagagcttgaacttgatgtcgccagtgaatatctggtcatggcggcgacgcttctcagcattaaaagcagaatgctgcttccgaaacaagaagaagagctgtttgaagacgaaatgcttgaagaagaagaccctcgggacgagctgattgaaaagctgattgagtatagaaagtataaaaccgctgcgaaggatttaaaagagcgggaagaagaaagacaaaagtcatttacaaagccgccgagtgatttaagtgagtatgcaaaagaaatcaaacagaccgagcagaaactgtcggtgaccgtttatgacatgatcggcgcgtttcaaaaggtgcttcagcgtaaaaaaatcacgcggccgaaagaaacgaccattacaagacaggaaataccgattgaagacagaatgaaagaaatcgtaaaaagcttaaaaacggcggggagaagaataaacttcacggagctttttccttctcggcaaagggaccatctcgtcgtgacgtttttagcagtcctggaactgatgaaaaatcagcagattatcattgaacaggaagaaaacttttcagatatatacattacggggagtgaatccattcatggcgtttgatatcgtgaattggaaagcgattgtggaagccctgctgtatgcggcgggtgatgaaggactgaccaaaaagcaattggtgacggtgcttgaaatagaagaagcggaactggccggaatcatggaagaagtggccgctcagtacaaggaagacgacagaggcatcgagcttaccgaatatgcggatacgtatatgcttggaacgaaaaaagaattcgtgccttatttgaaaaaactaatcgaagtgccgtcaaaagggctgtcgcaggcttctttggaagtgctggcgatcgtttcgtacaagcagccgatcacacgggcggaaattgaagatatccggggcgtgaagtctgagcggattctgcacagcctcgtgtcaaaagcgctgctgtgtgaggtgggccgcgccgacggtcccggccgggcgattttatacggcacgacaccggtatttcttgaacaattcggcttaaaaacattggaggagctcccgccgcttcctgaaaatgcggaggaagacgttctccaggaggaagccgatttattctttgaaaacttcaaccaaacttttgaggatattaaataataatcgtttttcatcatacgatagtagggaaaggccattgatgaatgacgcaaatgacgacgtacaagagaggaaggaaacggacggaaatgggaaattcgattgtgagggcccatactgaagaaactggtgaatttttagccgaggttgtcacgatggtcagcagctatttaaatcatacaacattgccggagatgcgggctcaaggagaggcggatgaggcatactgccgcgacgtgctcagtgtgctgaggaggatgaccgtcttttgcgaaggcgcccaggaagcctgccggcggctcttaatgcaggagccgtttcatgaggtgagagcggaaaaaacgctgtataaagtgtatcatcagtgcgtggaagaatttttcatgccaaaaaaggatacatggtacgaaaacagccgcgccgcttatacaggccaaagcgcgattgagttctaccagcaagtgccggactcgctgcggagccttctgctttcgctcagcagtgaatttctgcggatgcgggaagaattggcgcaatatgaagcatcaggctcaaatatggcatcagtcagataaaaactcttccttttgggagagtttttttatgtgaaagtgatgcaattggtattcataagtcatggacaggcgcataaacttgtacaaacccacaacaaggacgtgagcattcatgcgctttctcaaaaaagctgccgtatttcttttgacttttgttattcttttttccattacagacggcaatacggcacatgcccaaatacatgtcagcgcaaaaagcgcgattattatcgacggagcatctggcagggtgttattcgccaaggatgaacatcataagcggcggattgcaagcattacgaaaatcatgacggcggtgctggcgattgaatcaggaaagatggaagagaccgtgacggtttccccgaatgctgtaaaaacggaaggctcagccatttatcttcagccgggacaaaaagtaaagctgaaagatcttgtatacgggcttatgctgagatcaggaaatgacgccgctgcggcaatagctgaatatgtcggcggaagccttgacggttttgtatttatgatgaacaaaaaagccgagcaaatcgggatggaaaatacaaaatttcaaaatccgcacggactggacgaccatgaaaatttatattcaacggcgtatgacatggcgcttttgactaaatacgcaatgaaaatcaaggaataccggaccgtttcaggcacaaaagtgtataaggcggaaacgatggaccgggtatggaaaaataaaaacaagcttctgactgggctctaccgttacagcacaggcggaaaaacgggttacacaaaaatcgcgaaacggacgctcgtttcgacggcttcaaaagacggaacggatctcatcgcggtcaccataaatgatccggatgactgggatgaccatatgaatatgtttaattatgtctttgaacactataaaacctatgtcgtcgctaaaaaaggcggcattccgaagctgaaaaagacgttttacggaaaacacgcttttattgcccgggatgtcaaatatttattaaaagaggatgaaatcgacgatgtaaaaatccgcacaaccttaataaaaccgaaaaaagcctggaaaaaggacgcctctctcattcctgatgtcgtcggccggatgactgttatgcatgatgggaaagtgatcgccaagattcccgtctattatgaaaacgagcgccataaaaaaccgaaaaagcatttcattgagacgtttacgagcctgtttatgagcgcggcgggcggttcgtcatggtcaatttaatctgggtatgtctgacggtaatcggacttgtctttgcgatgtttaacggtaccttgcaggatgtgaatgaagctgtttttaaaggagcaaaagaagcggttacgatctcgttcggattaatgagcgtgctcgtcttctggctcggcctgatgaaaatagccgagcagtccggccttttggatatattcagcagaatgtgccgcccgtttatctctaagctgtttcccgatattccccctgatcatccggccatggggtacatcttatcaaatctcatggcaaactttttcggactgggaaatgcggcgacaccgctcggcattaaagccatggagcagatgaaaaagctgaatggaggtaagtctgaggccagccgttccatgattacctttttggcggtaaatacttcgagtattacattgataccgacaaccgtcattgccgtgcgcatggcttattcggcgaaatcaccgaccgatatcgtcgggccgaccatcttagcgactttaatttcgggaatcggcgcgattttcattgaccgctacttctggtaccgccgcaaaagaaaagggaggtaagcgaatggaaatggtgaattggctgtctttagccatgattccgattattatcgccggtatattgatatacggcacgatcaaaaaagtgccgacgtatgaatcattcgttgaaggcggaaaagaaggaattgagattgcgttttccatcattccgtatttggtcgggatgctggtggcgattaccgtattccgggcctcaggcgcgctggattttgtcatggggctgtgcaagcctttctttacagcgctcggcattcccgcagaagtcgtgccgcttgctctgatccgcccgatttcggggacggcggcgctcggcatgacgacagatctgatcgccgtgtacgggcctgattcatttatcggcagactggcctcggtcatgcagggatcgactgatacgacgctgtatgtcctgacggtgtatttcggggcggtcggcatcaaaaaaatgggggatgctttaaaggtcggtcttcttgctgatctgatcggggtggttgcatcaatcatcatagttgcgttattatttggaagcgcctgaaatcaggcgctttttatatatcagaataactctccttgaaaaagcttgtttgttcaaggggaaaaaagtaagattatacttgaggtgaacgacatggaaagactgcaaaaagttattgctcatgccggcgtggcatcacgcagaaaggcggaagagctgataaaagaaggaaaagtaaaggtgaatggaaaagtaataacagagctcggcgtaaaagtgaccggttctgatcagattgaagtaaacggattaaaggtggagcgggaagaacccgtgtactttctgctttataaaccgagaggagtgatctcagcagctgatgacgacaaagggcggaaagtggtgaccgactttttcaaagaagtgccgcagcgcatttatccgatcggcaggcttgattatgatacgagcggacttttattgctgacaaatgacggcgagtttgccaacaaactcatgcatccgaaatacgaaattgataagacgtacgtcgccaaagtgaaggggattccttccaaggaacttctgagaaagcttgagcgcggcattcagcttgaagaaggcaagacggcgccggccagagcgaaaatgctttccctggacaaaagaaagcagacgagcattattcagctgacgattcatgaaggccgaaacagacaggtccgccgcatgtttgaggcgatcggtcatgacgtgctgaaactcaaacgtgaagaatacgcatttttagatttaagaggcctgcgcacaggagacgcaagagaattgacgccgcatgaggtgaaaaggctgcgggctttagctgaacacggtaaaaacgctttctaattttcacataaccttcaaaaattacaaaacgtgtagatgatataattgaatggatttgcagacaggggaggggagcagtgtacaatgaacaaaaaacggcggcgtttattcattcggaccggcatccttctcatcttactctgcgcgctcggatataccatctataatgccgtttacacaaacggagagcgtatatctgaggggtccaaagccccgaatttcgcgctgaaagatacagagggcagactcatagaactgagtcagttaaaagggaaaggtgtttttctgaatttctggggaacgtggtgtgagccgtgcaagcaggaatttccctacatggagaatcaatacaagcattttaaagacctcggtgtcgaggtggttgcggtaaatgtcggcgaatcaaaaattgcagtacataattttatgaaaacatacggcgtcaatttcccggttgcgctcgatactgaccggcaagtgctggacgcgtacggcgtatcacctattccgacgacatttttgatcaatcccgacggaaaggtcgtgaaagtggtgaccggcacgatgacagaacgcatggttcatgactatatgaatttaattaagccggaggcgtcttcatgaaaaaggtcaaatgtgagtgcgggcacgtgaatccagccgggacggttttgtgcgagtcgtgcgggaagccgcttgatgatcaaaaatcgccgcttgccgatatgcggtacgacggcagcgcaaggcgttcgcaaacatataacaaaacaatcgtagataaggtatggaacttcttttcttccgtaaaagtcggaatatggctgatcgtcattactctggcggcgtctgctttcggcacggtttttccgcaggaagcttatctgcctccgggcgcccagccggatacatattatgaacagcagtacggcataatcggccaactgtattatttgctggggtttcatcacctgtacggctcatggtggtatatgctcctgatcgcatccattggcatatcactggtcatctgcagcctggatcgggtgattcctttgtacagggcgcttaaaaatcaaggagttcggcggaatccggtctttttgaagaggcagcgtctatacagccggacagaaaccgagctgagcggggatgcggctgatagcctcagaacacgattgaaaaaaaagcattatagagtgcgagaacaagagggaagcatcctggcggaaaaaggccgtttttcaaggtggggaccctatgtcaatcatatcggcctgatcatttttctgatcggagccatgctgagatttgtacccggtatgtatgtcgatgaaacgctctgggtccgtgaaggcgaaaccgcccagatccccggtacagacggcaaatattacttaaaaaacaaccggttcacgatgcagacatataacaaagacactgagaaaaaagtattcgccgacgccattgacagagccggaaacggcaaagtcgccaaatccttcacaacggacgcggttctgtacaagagggaaggcgacattgtattcggtgaaaagccgaagcttaaaagagtcaaagaaaacaatatccgcgtcaatgaaccgctgcgctttgactcctattctgtgtatcaggtggactataaagaaaaccagctcgatcagatggtatttcagctgatcgaccaaaaaacaaaacagtcattcggcaaactgaagatcaatcttcttgatcccgacacggactacgatcttggtaacggttacaaagtgcagattgccagttatcttcctgatttttattttaacaaagacggagaaccgagcacgaagacgaaggttcctaacaatccggcttttgtctttaaaatcacggctcccgacaagccgaaaggggagaaaagttttgttgcgattcagcagactgttgaaggttccgaaagtaacaagtacaaattaaaattcgaccatgtggaaacgaaaaacattacaggactcaccgtcagaaaagacttaaccttatgggtgcttgccgtcggcggcgcgatctttatgatcggcgtcattcaagggatgtactggcagcacagaaggatctggatcaaaacaggtgatcatgaagtgcttgtggcgggacatacgaacaaaaactggttcggtctgaaaaaggatatcgaatttgttcttagcgggaccgggattcaagagccggccgatcaaaaagaattggccaaaaatcaggcctagtgaaaaaggagtggtgtcatggcggagctgagcgcaaattttctttatgctgcctttttgatttatttaattgccgtcccggttttcggcggcgccatccggggaacaaaaggtgcgaaggacggtaagggccgctggtcggctatcggaatcacgttaaccattttcggatttctttgtcacctcggctactttattgcgagatggtcggcaagcggacatgcgcctgtcagcaatatgtttgaatttacgacgtcattcggcatgatgcttgttctcgcttttattattatttactttatttacagactgccttcattaggcatgttcacattgtctatcgcgcttttgcttatcgcatatgcaagcatgtttccgacagacatcacgccgcttattccgtcactgcagagcaattggctgtacattcacgtcacgactgcggcgctcgggcaggcgattcttgcgatcagttttgtagccggcgtcattttcctgttaaagcatgtcgaccaatccagaccgggcaaaaaaacgttctggcttgaagtcatcatgtttatactcgtgacgaccgtggcatttatcgccgtcacgtcggcattccggctggcggactacaaagcagaatttaattgggtggataaaaaagaggctaaaagcgtgatgatatatgatatgcctgcgcttgtcggcccgcatgacggagaactgcttacggaaggcgcaatgaagccgcttattgagcttccggccattttttcaggcagaaaggtcaatacggtgatctggtcgtttggcgcaggtctcgttttattcggggcgctcaggctgatattcagaaagagaatcagcgctcttataagcccgctcgtcaaaaatgtgaatctggacttggtcgatgaagtcggctaccgcgctgtttccatcggttttccggtattcacactcggcgcgcttgtgtttgcgatgatttgggcgcagcttgcatggacgcgtttttggggctgggacccgaaggaagtatgggcgctgatcacctttttattttacgcagcgtatttgcacttgcggctgtcaagaggctggcatggcgaaaagtccgcgtggcttgccgtcatcggcttcgccattattatgtttaacttaatttttgtgaatctcgtgcttgccggacttcattcgtacgcatagatgcaaaaagccgatacagttctcaagctgccgcacagtttgttaaaatgaaagtaacagaaggaaagcagggggaaaacgatggatcaaacaaatgaaactaaaatattagtagtagatgatgaagccagaattcgacgccttttaagaatgtaccttgaacgggaaaactatgtgattgaagaagcggaaaacggagacgaggccattaaaatggggctggcatcagattatgatctggtgctcttggatttaatgatgccgggaacggacggaatagaagtatgccggcagctcagagaaaaaaaagcgaccccgattatcatgctgacggcaaaaggggaagaagccaaccgcgtccaagggtttgaagcgggtacggacgattatatcgtcaagcctttcagcccgagagaagtggtgcttcgggtaaaggcgcttttaagaagggcttcccaaacatcttatctgacagccaataccccgacaaaaaatgtactcgtcttctcgcatctatccattgatcatgatgctcacagggtgactgcggacggcacggaggtgagcctgacgccgaaggaatatgaactgctgtacttcctggcgaaaacaccggacaaagtgtacgacagggaaaagcttttaaaagaagtgtggcagtatgaatttttcggagacctcagaacggtggacactcatgtcaaacggctccgtgaaaaattaaacaaagtgtctccgggagcggcgaaaaaaatcgtcaccgtctggggagtcggatacaaatttgaggtaggcgctgaatgaagttttggaaaagcgtagtaggaaagctttggtttaccattctttcactcgtgttaattgttttatttattttaacggtgctgcttctggaatttatagaaaattaccacgttgaagaagcggaaaaagatttaacgcagcttgccgataaaattgcggtcataatagaaaatcatgaagaccagccgcttgccagatccatcacgtgggaactggcggacaatttaacgagcatcgcgatcattcaggatgataagcatgtctggtattcgcccaatgacgataatcatttatcctctattacattagagcagattaaacatgaccgggatctgcacaaggcgctgacagaccgcaataaagtaagcaaacgcgcggtccccaaaaatgccggttcggataatgaacggctgatcgtcggagtgccctatgaaaaagacggcaaaaaaggcatggtctttttatcccaatcgctgcttgccgtcaaagatacgacgaaacatacgacacgctatatttttcttgcggcgggcattgccatcgtcttgacaacgtttttcgcattctttttatccagcagggtgacatatccccttcggaaaatgcgggaaggcgcccaagacttggcgaaaggaaagtttgatacaaaaattccgattctgacccaagatgaaatcggggaactggccattgcctttaatcagatgggacggcagctcaatttccatattaacgcgctgaatcaggaaaaagaacagctgtccaatattttaagcagtatggcagacggggtcatcaccattaatatcgacggcaccattttggtgaccaacccgccggccgaacgttttctgcaggcatggtattatgagcagaacatgaacattaaagaaggagacaaccttccccctgaagcaaaagagctgtttcaaaatgcagtgaacacggaaaaagagcaaatgattgaaatgacgcttcaaggaaggtcatgggttttattgatgtcgcctctttatgcggaatcacacgtccgcggcgccgtggccgtgctccgtgatatgaccgaagagcgcaggctggataaattgcgtgaagacttcattgccaatgtcagtcatgagctcagaaccccgatttctatgctgcaaggatacagtgaagcgatagtggacgacattgcaagcaccgaagaggagaaaaaagaaatcgcgcagatcatttatgatgaatctcttcgtatgggccggctcgtcaatgatttactggatttggccagaatggaatccggacatacgggtctgcgctatgaaacggtaaacctgcatgaatttctggagaagatctcccgcaaattttccggtgtagcgaaggaaaaaggcgtttcgctcacagaggacatctcggtgtctcagccggagtgtgtctttgacgaagacaaaatggaacaggtgtttaccaaccttatagataatgcgctgcgccatacggagtcaggcggaaacgttcatatcgcggctcataccgtaaaagacggactgaaaatcgatatcaaagattccggctcgggaataccggaagaggacctgccttttatttttgaacgtttttataaagcggacaaagcaagaacaagaggcagggcagggaccggactcggactcgccatcgtaaaaaatatcgtggaagcccacggcggctcaattgcggttcacagcagcatcgacaaagggacgacgtttacattttatattccgacaaaagcgcaggatgacgtctgaaattgacgaacaatcttgttccatacgaaacacccgcagaacatgcgggtgttttttgtttttttctcctttaaaaatttaagaatatgttaatataaattcccttccaaattccagtttctcgtaatatagttgtaatgtaacttttcaacgcatttttacgacaaaaaagtgaacggaggggtttcccatggaagaaacctttcagatattatacgatgcataccatcaagatttatatcaatttttattttatatggtaaaagataagtcgcaggctgaagatttgacgcaggaagtgtatatccgcgtcttgaattcctatcatacatttgaaggaagaagcagtgaaaaaacatggctgttgtccatcgcacgccatgtggcgattgactggttccgcaagcagcagacgatcagacagcgtattatgggtacgtttgattgggatacacaagatgtcagagatcagcatttgcttccggacgaactcgccgtacagcatgaaaatgtccgggaaatttataccgcgcttgatcattgcaccattgatcaaagagctgttattatcttgagatttattcagggatattccattcaggaaacagccgccgctctccgcttctcggaaagcaaagtcaaaacgacccaacacagagggctcaaaatacttcggaaacagatggagcttttgagggaggagctaatggatgatgaagtcatattggaacgaagaaagagtagaggagttgttaagacaacttccggcggttagagatcatcgttcacccgaggccatttaccggaatattgaaacgggtaaaccgtacaggaaaaaaccggcccgaagctggatcggccccgctgcagccggcatctgcgcattgtgcatcgctctgattatttctcctcacctgatgacaaacaaatctgccggtgatcttacagctgacagcggtcaagctgaaaaagccagtcagtcagctgctgtcaagccggatcagaagacgtttgtcgtttctaacgaaaacaaaaacaattacattactttggcgtttgccgattcagatacatccgccgtcattccggtcagttttgaaaaaaagaagcctgacgaatcggtttcagaggcattatctgatgcaggaaacttagaagtgcccgaatctttcctctctgtgccgaaccttttggacggtgtgcaggtaacggcggataagaaggatttgcttgtgcaggtaaacggacgtctttctatcgaatcagctgccgattctgatttattgaaaaagatgctgaaagagactttgacatggagtccttacgagcggattaaattgaaaaaggttcaaaacggagacggacaggatttttataaatcttacggcatttccgctgagatgtccgtacataaacagacaaaccgggcgtatttttcttacagcgacagtctgggacaagagtatctcatcccgtctgaacaaacctattattcagtatatcaggctattgacgggatgaagacaacagacggaggctcacagaccgcgagcattatagaagcagatgcgattgcatcggtatcggaaagggaagacggcgagcagctgcggatccaattgtccgaaaaacataaagttgaagattcgctggaaggcattttaatgatcgaagggcttttgttaaccgcgaaggaattcggttattctgaggtgctgttcacacatgcgcacgcaaagaaaatcggtaattatgatgtgacaaaaccgattgctgtgcctgccgcgcctaatccgcttccgacccattaaacgtaaaaaaacccaaaacatatgaatgttttgggttttctgttggttacggaaggtcaatcagtttaacggaaacaatatcctgaaccgaagtcagctcattgacgactttatcatctaaatgtttatcaaaagaaagcatcataatggcttctccgcctttttctttacggcccacctgcatggtagcgatattgatatcgttatcgccgaggatgcgtccgacgcgtccgattacaccagtcgtatcctggtgctggatataaacgaggtggccggcaggatttaagtcaatattaaagccgttcagttcaacgattcgttcaccgaagtgagggatatacgtagccgttaacgtaaatgtgctccggtctccggttacttttacgctgatgcagttatcatatcctgattcattggaggaaatcttctcgctgaagctgataccgcgttcttttgctacaccgcccgcgtttacttcattgaccgttgagtctacacgcggttttaagaaaccggacagcaggctttttgtaataaatgatgtttcaagtttggcgatggtgccttcatattgaatcgcaacatctttgacgggttccttcatacattgtgatacgagacttccgattttatcggcaatttggtgataaggctggatttttttgaattcatctttcgtcatcgcaggcaggttgatcgctgacatgacaggcagaccttttgcaaactgcagcacttcttcagaaacctgtgccgcgacattcagctgtgcttctttcgttgaagcgcctaagtgaggtgtggcgatcaccagcggatggtcgggaagctttgattcaactggcggttccacttcaaacacatcaagggcagcgcctgcgacatggccgctttccagcgcttccaaaagcgccgcttcatcaataatgccgcctcttgcgcagttgataagacggacgccttttttcgttttggcaatggtttctctgttaagcaatccttttgtttcctttgttaaaggcgtgtggacggtaatgatatccgcgctttcaagcacttcttcgaatgtccggctgtttacgccgattttgccggctctctcttcggttaagaaaggatcgaatacatgaactgtcataccgaacgctctggcgcgctgggcaatctcgcttccgatccggcccagaccgacaatgcctaaagtctttccgtagagctccgccccgacaaaagccgtccggttccattctcttgattttactgagatattggcttgcgggatgtgtctcattaatgaagaaatcatcgcgaatgtatgctctgccgttgaaatggtgtttccattcggcgcgtttatcacgataactccatgttttgtggcctcatcaatgtcgatgttgtctacgccgacaccggctctgccgacgatttttaaagaagtcatctttttaaacaattcttcggttacttttgtggcactgcggactaacagggcatcaaaggtatgtaattcatcttctgcatccgcgacgtttttttgaacaatttctataaagtctgattccatcagcggctttaagccgtcattgctcatcttatctgagaccaaaactcgaaacattgttagatttcctcctagtttagctgactaaatatctgataatttatcatattctcaatagagtgtcaatgtgtattgacgcagtaaaggagaaaaggaaaccgctgaatcagctgaaattgggcttccccaatattttatttaaatttgagcagttctctatacaattacaatttgatcatatataatgtgaataaattcataagatcaatcttcggggcagggtgaaattccctaccggcggtgatgagcgtcacgctctaagcccgcgagctgcttcggcggcaggatccggtgagattccggagccgacagtatagtctggatgggagaagatggaggttcagcagacgttttgatgcttatatcaaacgtttctttgccaagccttagtaagctcccgctttttaacaaaagcggtttttttattggggcgcaaaagaacctttcctcttttcgagagatttgatcgaaaaggagagagcattgtgaaagtaaaaaaattagttgtcatcagtatgcttagcagtattgcgtttgtgcttatgctgttaaatttcccgtttccggggctgccggattacttgaaaattgatttcagtgacgttcctgcaattatcgctattttggtttacgggcctgcggcggggattgcggttgaagcgattaaaaatattctgcagtatatcattcaaggaagcatggccggcgtgcctgtcgggcaggcagccaattttatcgcggggacgctgtttattctgccgacggcgtttatgtttaaaaagctcaattctgcaaaagggcttgcagtgagcctgctggccggaaccgcggcgatgaccgtgctgatgagtattttgaactatattcttatcctgcccgcgtatacttggtttttacattcaccggcattgtcaaacagccagttgaaaacggcggttgtcgcaggaattctgccgtttaacattgtaaaaggcattatcatcaccatcgtctttacgttcatctttacgaagctgaaaccttggattgaacaaaaacgcagcatccaaacacaataaaggcttaaagcgtccgctctgtgaagaacagccggacgctttttttgtttgtgctgatcggcaaaaaaataagactccggccgataacagccggagtcttattcaggacgaaaaagctcctctcacggggagggcttttttattcgtatttcagcgggtcgccttcgaacggttcatccgcaactttgattgaatcagtagggcatccttcaaatgcgtcaatcatatcttcttccagaacttccggaacttcgacgacacctttattttcgtcaagcgtaacgaacgcaatgccttcatcatcataatcataaatgtctggtgccgcagctccgcaggcgccgcatgcaatacacgtatctttatctacaattgtgtactttgccatgaataaaacctcccagattgttcgtgttggaacaaatggtttaccttatatatttttaaatataacacctattcctcttacttattgtaatgatgttagtgtcaaatttcaacagaaaaatgattgagaatgcttatcacataagggattctctttagcacttccccctaaaagatgactttaaacgtcaaatttatatgaaaatctgttaaaataaaaagaaccaaaaaacgaaacttgtcacaaaagaaatgtaggtgtgtttagattggcgataaactactttgataccgtggttctcgactgtctggacaaaatagacggcgaacggactccgagtgctgtgtttcatttattaaaaggaaaaaagtcgtctcaaaccattcaggatgccggcttatttcagatcgctaaatatttcggcatggcttcacagtgtgaacgcggcgatattgcggcttctatgcatagactcaccgagaactcatacatcacagccggaaaagaagagggaacgcggaaagtgactgcgcgcggcgttcaaaggcttgaacgggcgtttgctgagcggccttggccgaagcactgccacggcgcaaattatcaaacgcctgccgtcatcctgtggaggcggctttccctgctcattcaagtcctgtcaaacaaagagcatcaatgcagtcaatatatcccggttaccaacgatgtgcagacgctgagatgggtcaaatggttcatgcggaaaaacagagatgctaaagagctttccgtccaaatgcatgacgcgctgtttcagcttctgcaaggcgtaagtgaacggcaggcgcttatttttgtctattctttaacttcattcaacagaatcggcaaaacgaataagcagctcgctctccagctgaacgaagatgaatggtatgtgtccgtccagttttggggagcggtacattatgttattcaatcgcttccgcaatgtgcatatcccgctctgcgcgagctgttgtccgatctgcaggcggaaagcgcgctgacacagtctgccagaaaaacctttgagctgttggaaaaagggtttccgattgaacggatcgccgcggtcagaaatttaaaaaccgccacaatcgaagatcatatcgtagaaatatcattgcatcagcctgcattttttatagaacagtatctttctgaagaggaacagcgtatgataacggcatttgcaaaacagcatcaaacaaataaaattaaacggattcgcgaaggaatgcagatgcgcttcagctatttccagatcaggctggcgctggcaaagacggtgaatcagcatgactgagctgcataaagctttatccagatattttggtttgcattcctttaaaaaagggcaggaagagattatgactagcgtgctccaaaaaaaggatacgatcgccatgcttccgaccggcggggggaaatcattatgctatcagctcccgggttacatgatggacgggctggtgctgattatttcaccgcttctttcattaatggaagatcaggtgcagcagctgaaagcaaaaggagaaaagcgggttgcggcattaaacagcatgctgaattccgcagagcggcattttattctcagcaacatcagccggtataaatttctctatatgtctcctgaagccctttcttcaccttatgtactgaaccgtttgaaaaacgttccggtcagtttatttgttattgatgaggctcattgcatatcggaatggggacatgatttcaggcctgattattcgaagctcgggcctttcagacaggcactcggaaagccgcctgtattggcgctgactgcaacagcgacaaaagaaacgctcagagacgtgacggatgtgctcggacttgagcatgcggtgcgtcatctttattcagtcaaccggccgaatattctcctggcggcagaacatttggctgataatgccgaaaaaataaacaggctcacggagcttgccgaaaagcttgaaggccccggtatcatatattgtccgaccagaaaatgggcggaagagcttgcggctgagctgaatgaaaaaacgggaaagcggacggattattatcacggcggaatggatacaggggacagaatcttgatccagcagcaatttatccataaccagcttgattgcatctgctgtaccaatgcgttcggcatgggtgtggataagtcagatatccgctttgtcattcacttttatcctccccaaacggctgagggctttatgcaggaaatcggcagagcgggacgcgacggcagcccgagtgtcagtattttgctgagggcgcccggcgataccgagcttcagcagcagattattcagacagaaagcctgtctgattatgatctggaaggcattttggccgtcatacgggatgccggtacggatgatgagcgaaagcttcgggacgttctgatcaataaaggcgtccaggaaacacaggcgcgaacggccgtccatctgtatctgcaaggaaaaaccacaaaagagcagctgcaggaagaactgacataccgcgtggaaaagaagctgcgtaaaatgaaccgtttttcggcgttattagagcggaaagaatgtataagaaaagcgctgctgtcttattttgatgaatcgtatgagcctgaaggccaaaccggacaatgctgcagcagctgcggacttgatctggctccgtacgagcaaaaaggagaacggaaaaacatggaacggtttgaagattggaagctggaattaggccggattttcggttcagagtctgcgggtgagttcagctgagacggcaaagcgaattgatccagcagctctcagaccgggagattgtgatacagctgtatgccacccaattgctcatattggcggtttcagctgttatcggctttttctttttcaccgacattcacgattttttaaagctgtggcatatacgtgacgataatatcatatggtacggtgtaactcttgccgtccttgtcatttttgccgatctggcggtgatgaaatggtgtccttcgcatttatatgatgacggcggcattaatgtattgctttttaagaacaggccggttctgcacattttgtttttgacgcttctcatttcgttcagcgaagagattttgttcagaggcgttctgcagacacatatcggcttatgggccgccagcttcatttttaccgtgcttcatttcagatacttggcgaagtggcttctgtttatgatggttgcgggcatcagtcttttgctggggcttatctatgaatggaccggcaatttattcgttccggttacagcgcattttattattgatgcggtatttgcctgtcagatccgttttcaatatgttaggaggggtttgcatgacggaaatgtcaagagttgaaagaagaaaagctcagcagcgtgccgagcagcaggttgccgcggccgcggatgaacaaattgaatatcttgaagacagcctcccgacaagacaatctgtaaaagaggagcgtaaaaaaaaggaagagcaggtgaaggaaaaaaccaaaacaaaaacgccgctgttcacttttctgaccgtcctgttcattatcgtaacaatcggtgtctttttcggtcttctttatatgacgaacagcagcagatttgacccgaaggactatgaagatgtcttcatagaccacagtgaaagcgcgcctgccgttattccgaaaggcgctcagaaagatacgtcagaaaccgctcttttagaacaaccgaaaaaaaagtctgacgacaaagataagaaagaagcggctgcatctgaaaaaacaaaagaaaaaccaagtgaaaaaacacctgaaaaaacggaaacgtcctcagaaaaacaagtaaagccgacagacaccgaatacgcggagacaaaacagcagtctccgccggctgtccgtgaaaaagcggctccggctgccgcaagtgatcaagctgggactgtcccgaaaaaagtgcggaccgtacagcatactgtacagccgaaagaaacgctttaccgcatttcaatgaaatattataaaagccgggcgggcgaagaaaaaatccgcagctacaacggattaaacggaaacgacgtgtacaccggccaggttctgaacattccgctgtctgattaaaataaatgcatgttttcaccgcgtttttcatatagtgtactaatgaaaacggacaaggtgtgaagcgcatggattctttatggaagcaattagaccgatttgctgacggaccgacgaaacaaatgcttcaggcgctggtgaaacggaaattaaaatacgaaaattatgccgcacaatgccgaagatggcagtgggcgtccctcgtttgtttttccctgatgtgcatactgctgatgtttaaaagctttaatgccccccaagcctctccgcagctgattctgcaggaaatattaggccatacggtttatttgtgctggattatggcttccgcttttgcgtattgcacttcttattattttaaaaaaaaggaagaaaaagctgagggtgaatttcataaactgagatgtgaaattatccaaaaaagcacggatttatggccccagcctgaaaaatggagggcgagagaatctgtttttcacttgatgaaacatcggtatgatatcaatctttattttgaaagcaaataaaatgaggcgttttccggaaaggatagaaacgtctttttttgtttgtccgtctaatgtaagacaatgacagaatggagagtgcgtttatgaagctaacagcgggaattctcggctcattggcgggagcggctgcggttatggcggccgtcatgtacaaaacggcaaacggcagccatctgaaaacacatacatttacgcttgataaaatgaaagggatgaagccgctcaccatcttctttatatctgacgtgcaccgccgtttaattgatgaaaagcttctccgcgaagcggcagtttataagccggatgccgttttgctcggcggtgatttggcggagggcggagttccttacgccagaattgaagaaaacatcaaacgtctgacggctctcgcgcctgtcatttatgtgtggggaaataatgattacgaggtcagccagcaaaaattgctctcacttttacgggcatacaaagtgattccgctgagaaatgaatcggttcagtttgcttataaaggggaaaccgttacgatctgcggggtggatgatatcaggatgatgatggatgattacgaagctgcaatcagatatacggatgctgataaagtaaaccttctgctttgccataaccccgacatccatgagcagatgagggagtcagacgggattgacgctgtgttcagcggccatacgcatggcggccaaatccgtttcggccggttcgggccgtacgaattgggcggggcgggaacggtaaaaaaagcgcattatctgatcagcaacggctacgggacgacaaaagttccgctgaggctcggggcgaagccggagacgcatatgattacgctgtgcgggccggatgagccgttttcctgaaacaaatccggccgcggtgataaaaaacggcattctgcttgtcttcccgctgtacacggtgtaaactgataacaaattaagaacctatgactcatttattcatatactgtgttatatgatttgtgtgcaagaagaggcaggagggaacattatgcggcttgagcgtctgaactataataagattaaaatctttttaaccctcgacgatctgactgatcggggactgacaaaagaagacctctggaaggactcgtttaaagtccaccagttatttaaagatatgatgaatgaagcaaatacagagctcggctttgaagcgaatggtccgatcgcggtggaagtatattctcttcaggcacaaggtatggttgtgattgtaacgaaaaatcatgacgcggacgcagaagatgacgaatatgacgatgattatatcgagatgcaggtcaaacttgacgaaagcccggatattatttatcagttccattcgtttgaagatatcattcagcttgccggaagccttcaccgcatcgggattaccggcggcaccgtctaccattatgagaaccaatactatgtaagccttgaagacctcggctcccgttccgccgaaggtgtcatcgcggtgctggctgaatacggacacccggcgacaattacgatttacaggctccatgagtacggaaaactcatcatggacggcaatgctgtggaaaccatccagaaacatttttcataaaaaagatttgaaacggcagctgttttcagcggccgtctttttttaagcgaaataatggaaaaatcattgtctttcttctatgcacggagatattgaaggtgtatactagtcactgaaagggagcatgagagaaacagaagattttaggaggttaactcaaatggcagccgatcgattcaccggtcataatgaagaagacaaacatgatgtattaaaatcaacccaaaccgtaatacataaagctctggaaaaattggggtatccagaagaagtgtatgaactgctgaaagagccgctcagattattaacggttaaaattcctgttcggatggatgacgggtctgtgaaaatatttacaggctatcgtgcgcagcacaatgattccgtaggtccgacaaaaggcggcattcgttttcacccgaatgtaactgaaaaagaggtgaaagcactttccatctggatgagtttaaaatgcggaattattgatcttccttatggcggtggtaaaggcggaattgtttgtgatccgagaaatatgtcattcagagagcttgaaaggctgagcaggggatatgtaagagcaatcagtcagattgtcggaccgactaaagacgtcccggcacctgacgtatttacaaactcacagattatggcttggatgatggatgaatattcaagaattgatgaatttaactcacccggctttattacgggaaaaccgcttgtactcggcggatcccacggcagggaatcagcgacggcaaaaggcgtcaccatctgcataaaagaagcggctaagaaaaaaggtctcgatattcagaacgcgcgtgtcgtcgtacaaggtttcggaaatgcgggcagctatctggccaagtttatgcatgacgccggcgcgaaagttgtcggaatttctgacgcgtacggaggcctttacgatccggacggtcttgatattgattatctgcttgaccgcagagacagcttcggaacggtgacgaagcttttcaatgacaccattacgaatcaggagctgcttgagctggactgtgatatacttgtcccggcggcgatcgaaaaccaaattacagaagaaaacgctgaccgcatcaaagcgaaaatcgtggtagaagcggcaaacggaccgacgacactggaaggaacgaaaatcctgacagacaaaggaacgctgctggttcccgatgttctggcgagcgccggcggtgtaacggtttcttatttcgaatgggttcaaaacaaccagggcttctactggagtgaagaagaagtcgaggaaaaactggaaaatatgatgataaaatcgtttaataatatttatgaaatgtcccaaaaccgccggattgacatgaggcttgcggcttacatggtcggcgtgcggaaaatggctgaggcttcgcgtttcagaggctggatataaaccaatcgtttgcataaacaaaaaaaatctcctatgataatataggagattttttatatgagtggaaacttatgatggaaatgccaatcgcaggagttgaaggacatgacagaagaaaaagcaattataataggcggaggtccttgcggattatcggcggctatacatctgaagcaaattggcgtgaacgcgcttgtgatcgaaaaagggaatgtcgtaaacagcatttataactatccgacgcaccaaacttttttcagttcaagtgaaaaattggagatcggcgatgtcgcctttattacggaaaacagaaaaccggtccgaatacaggctctctcttactacagagaggttgtcagaagaaaagagctgcgcgtaaacgcctttgaaacggtggagcgcgtaacgaaacaggaagacggccgttttcttgtagaaacgtcaaaagaccgctacctcactccgttttgtatcattgcgacaggatattatgatcatccgaattatatgaacataccgggtgaagggcttcctaaggtatttcattactttaaagaaggccatccttattttgataaagatgttgctgtgatcggcgggaaaaactcaagtgtggacgcggctttggaactcgtgaagtccggtgcgcgcgtcacggtgctctacagaggacatgagtattccccgagcatcaagccgtggattctgcctgagtttgaggcccttgtcagaaacggcacaatccggatggaattcggcgcttgtcttgaagaagtgacggaagatgaaatcattttccgctccggccgaaatgagacggtccggctgaaaaacgatttcgtatttgccatgacgggataccatcccgatcacggtttcctcgaaaaaatcggtgtgcagattgatgctgaatcaggccggccgtttttccgggaagaaacgatggaaacaaatgttgacggtgtttttatcgccggagtcattgcggctggaaataacgccaatgaaatttttatcgagaacggccgttttcacggcggcttgatcgcaaacgaaatatcaaaacggctgggtgcagagagcatatgatcattcatatgctcttttttaaaaaattgaaagatgtaaaaatatgaacaacatggtaccatagatataggaatataaaggaaagaggttgcctgatgtttgcaatcatctctgcaggaattgctcccggcattgcgctgttaagctatttttatttaaaagatcagtatgacaatgaacctgtacatatggtgctgaggtctttttttctcggggttgtccttgtgtttccgaccatgtttatccaatatgttcttgaaaaagagcatgtggggggaggaagctttttcgtttcgtttttgtcttcgggatttttggaagaatcggtgaaatggttcgttctgatgatcagtgtgtacccgcatgctcattttgatgagcattatgacggaatcgtttacggggccagtgtgtctttaggctttgccacgcttgaaaatattctgtatttattcggccacggcgttgagcatgcttttataagagcgcttctgccggtctcctgccatgcgctgatcggagtgattatgggattttatctcggaaaagcccgcttttcgcagaaaaaagcccgtgtcaaatggcttgtgatttcgctggccgtgccttcatgtctgcacggttcttacgattttattcttaccgccctcaatcattgggtatattatatgctgccgtttatgctgtttttatggtggttcgggctgcgaaaggcaaaaaaagcacgctccgtcaatatgatccaagtgtgaagaaaccgcgcatcgcgtgcggtttctttttttatgccttgatgagggataagaaggaaacggtgtataaaaatatccgcgtgacagacaatacgggtacactttaaattttgcagtaggaggcttgaagagatgaagtgcaaaggagcctttatggcatgtctcattctattttctttcgccgccgctttcttcgatcatcatgaaacggttcatgcgttttcaaatcaagtgattcaaagaggcgcgacgggtgatgatgttatagaattgcaggcccgtcttcaatataacggattttataacgggaaaatcgatggtgtttacggctggaccacatactgggccgtgagaaattttcaggagaaattcggcatgaagccggttgacggcctcgtcggggcgaaaaccaaacaggtgctgatttcaaaatcaaaatattaccgtgaatatgtaatggagcagatccaaaaagggaatacgttcactcattatggcaacgtcccattggaaaaccaaacaaaaccgagagccggagcgcagaagcctgcggaaacgaataagcctgctcaaaagccgcaaaacaatacaggcggtcagtcaaatcaaaagcaaaatacgacagcggctaatatgcctggcggtttctcaaacaacgacatcaatcttctggcgcaggctgtgtacggggaagcgcgcggtgagccgtttgaaggacaggttgccattgccgcggttattttaaaccgtattaaaagcccgttatttccgaatacggtggccggcgtcattttcgaaccgctcgcgtttaccgccgttgccgacggccaaatatacatgcagccgaatgaaagagcaaaagaagcggttcttgatgcgattaacggatgggacccttctgaaaacgcgctttattatttcaatcctgatacggcgacaagcaaatggatttggggacgtccgcagattaaaagaatcggaaagcacattttctgtgagtaaaagtacgcaaaatgaggtgttaacatgattagaggaatcattatcgctgttctcggtgtcgcgatcgccgcaaccggatactggggatataaagagcatcaggaaaaagatgcggtccttctgcacgcggaaaataattatcagagggcttttcatgaactgacgtaccatgttgatcagcttcacgacaaaatcgggacgacgcttgcgatgaacagtaaaaaatctctgtctccggcgctcattgatgtatggagaattacatctgaagcgcataacaatgtgagccagctgcccctgactctcatgccttttaataagacggaggagtttttatccaatataggagatttcagctataaaacatccgtccgggatttagaccaaaaaccgcttgataagaaagaatatacaacactgaacagcctgtacaaacaggcggagaacattcaaaaccagcttcgcagcgttcagcatctcgtcatgagcaaaaatttacggtggatggatgttgaaatggcgctcgcctctgacaaaaaacaaagcgataatacgatcgtcgacagctttaaaacagtcgaaaaaaatgtaggcgctttttctgaagacagcatcagccccacatttacgggagcaaatacagaacgaaaaggttttacgcatctgaaaggaaaacaaattacggaaaaagaagcggtaaaaatcgcacaacggtttgcgcctgatcataattattccattaaagtggtcaaaagcggccggaagacgaatcgcgatgtatacagtatccgcatgaatgacgcggatcacaaatcttttatctatatggatattacccaaaaagggggacatcctgtctatttgattcaaaaacgggccgtgaagaaacaaaagatcagcctcaatgaagcatctaaccgggctgtcgcgtttttaaagaaaaacggatatgaaacaaaaggtctcgaaattgatgaaagcgcgcaatataataacatcggcgtcttttcttttattcccgtggagaaaaacgtccgcatttatccggaagccatccgaatgaaagtggcgctggatgatggtgaagtcgtcggtttttccgcgcgtgattacctggcggcgcaccgcacgagaacgattccggctcccgctttgtcagctgatgaagcgaaagcgaagctgaataaaaatgttgaagtgcgggagacccggcaggcgctgatcacgaatgaactcggtcaggaagtgctttgctacgaaatgctcgggacgatcgggaaagacacgtatcaaatgttcattaatgcggacgacggaaaagaggaaaaaatagaaaaattaaaaagcgcagagcctatatataaagacctataaaaataaaggaggaaaggactaaaagtcttttcctttttttcattacatgctttaataaaagcataaataatgaaagagtgaaggccatgatagctgtcggagattatatttggattgaatacatagagaacaatgagcccaaaaaagcgaggagtaaagcagtaagcgttgaaaacggcgaactccacatctcatatcccgtcgatctggattcgggacggacggtctttttgcataaaggattggaaataacagcggaatttatggggaatggccaagtaccgtatcaatttaaaagcataattaaaggaaagaaaaaagaacccatcccgatgatcggattggacatccccctcaggaggaaatgaagcggattcaaagacgccgatacgtccgtgcagacgcagtattggatgtatccgtcaaattggaagcgaaaaaaaccgcttttcaaacggtttcctctaatatcagcgccggcggaatcgctgttgtgatgcctgagcatatttccgcggaaccaggtgaaaagctgtatgtctcattttctcttcccggcaaggaaaatggggcggatataacggccgaggctcttacccagcggattttttatgatgaaaaggcggataaacaaaaaatgacgcttgaatttacagaaatcggccccgcagcacagcagcttttactccaatattgtatgcgcgcgcagctgcagcagagaagaaacagtctgtcggaataaacagcagcgcacttttccatactaatcctaatggaggtgcgcgtgtatgaaaacatttgaacgtctgctggtcaaattggtctgcattcagcttataattttgggcgcggtgcagtttttgcttcattatcagcctattgaaccttatatttcgaaagctgtgaaatatgagggagttgataaaatggagaaaaaagaatggattgaaacggtaaagcggtaaatcagctcaattttttcgccccttttccggcagttcatgatacaatccatagaggagtaaagagcaaggagagagattatggacaagaaattatcaattgcgatcgacgggccggccgctgccggaaaaagcaccgttgctaaaatagtagctgagaaaaaatcatatgtgtacattgatacaggggcgatgtatcgtgccattacatatacggcactcaagcagaatgccgatttaaccgatgaagccgcgcttacagagcttttgaagcgtacggaaattgagcttgtatccgctccggaaagacaaatcgttctcgtaaacggagaagatgtgacagaagaaatccgaaaagacgaagtcagcaaccaagtatccatcgccgccaagcataaaggcgtcagagaagaaatggtcaaaagacagcagcagctcggacaaaaaggcggtgtcgtcatggacggccgtgatatcggtactcacgtgctgcctgatgccgaagtgaaaatttttctgctcgcgtccgtagaggaaagagcgaagcgccgatatgaagagaataagaaaaaaggctatgacgtgaattacgagacgctcattgaagaaattgccagacgcgacaaactcgattcagagagggaagtttccccgctgcgcaaagcggaagacgcgattgaaatcgatacgacgtcactcagcattgccgaagtcgcaggaaaaattctggagatcgtcgaacagaaatcacgttaacttcgggcggagcgctttttaatttttttcaaaagacaagatgttattgcttgacaaaccagtccttttattagaagttaatactaataaaactttttattgatcattcaaaatcttttttggatgattctttaatacatattcggctgaaaagcggacattcacatgttcagctttcaaaccgtattaattaagctgtgtaggtttggaccaaggaggttattcaaatgacagaggaaatgaatcaaattgatgttcaagtgccagaggttggagatgtagtaaaagggattgtgacaaaggtagaggacaagcatgtagatgtcgaaattgtcaatgtcaaacagtccggaatcattccaatcagtgaattatcaagtcttcatgtagagaaagcatcggatgtcgtaaaagttgacgacgagcttgacctgaaagtaacaaaagtggaagacgatgctttgattttatctaaacgtgccgttgatgctgaccgcgcttgggaagaccttgaaaaaaaattcgacacaaaagaagtgtttgaagctgaagtgaaagatgtggtgaaaggcggtctcgtcgttgatatcggcgttcgcggcttcattcccgcatcacttgtcgaagctcatttcgtcgaggatttcactgactataaagggaaaaccctctctcttatcgtcgttgaactcgaccgtgataaaaaccgggtgattctgtcacaccgggctgtagtggaaaaagagcagacagccaaaaagcatgattttctccaaacgcttgaggttggaagcgtgcttgaaggaaaagtgcagcgtctgactgatttcggcgcatttgtcgacatcggcggaattgacgggcttgttcatatttcgcagctgtctcattcacacgtcgaaaaaccgtctgacgtggtggaagaaggtcaggacgtaaaagtgaaagtgctgtccgtagaccgcgataacgagcgtatttctttatctattaaagaaacgctgccgggaccttggagccagatcggcgaaaaggtaaaacagggagatgtgcttgaaggaaaagtgcagcgccttgtaagcttcggcgccttcgttgaaattcttccgggcgtggaaggacttgtgcacatttcgcaaatttccaataaacatatcggaacgccgcatgaagtgcttgaagaaggacagactgttaaagtgaaagtgcttgacgtgaacgaaagcgaagagcgcatttccttaagcatgcgtgagcttgaagaagcgccgaaagccgatcaggaggacttccgtcaataccaggcgaaagaagagccgagcaccggcttccagcttggcgatttaatcggagacaagcttaataaattaaaataaattggtgataaaacgtgacacgagcagaacgaaaaagagaacatataaatcatgcgctgtctaccggccaaaaccgggaaacggggcttgatgatattacgtttgttcatgtcagcctaccgaacctagcattggaaaaagtggatatatcaacgaaaatcggcggactcacaagcagttcgccgatttttatcaatgcgatgacaggcggcggcggacagcttacatacgaaattaacagatcgctggcaagagccgcgcgcaaagccggcatgccgctggctgtcggttcgcaaatgtcggctttaaaagatccctccgaacggtattcttacgagatcgtcagaaaagagaatccggacgggctgatatttgccaatttaggcagcgaggcggatgccgagcaggcaaaaagagcaattgatatgattcaagcggatgccctccagattcatttaaatgtgattcaggagatcgtcatgccggagggagacagaagctttaccggcgctctcggccgtattgagcggattgcggcggaagcgggagttcccgtttttgtcaaagaagtcggcttcggaatgagcagggagtcggcacggcagttatttgatgccggtgcggcagcagttgatgccggcggatacggcggtacaaatttctctaagattgaaaatatgcgcagagagaaggcgcttcaattttttaatacatggggaatttccactgccgcaagcttagcggaaatccactcgctctccgctgatcaatcaattatcgcatccggcgggctgcaaagtgccctggatgtcgccaaatcgattgccctcggcgcttctggcgcgggaatggcaggcactttcctgaaagctctcacctccaaaggagaagaggggctgtttgacgagatgacggtgcttttacaagagctgaaaatgattatgaccgccctcggatgccaatcggttgcccaattgcaaaaggcgcctttggtcataaaaggtgacacacatcactggctttctgaacggggaattgacacatcccgtttcagcagacgttaaaaggcatgcgaacccgcatgcctttctctgttttttacgattttctttttcggaattcaccgttttgttcaaggctcgtcgctcctttatggtgaattgaatcatcgcgatcagattccacccggcgggaggctttcagttttttctcctgtctgtcttttcccatttttatccgctcctttcaggcataattggtttaaaaaatgcgttcccgctccatactggtcagaggaggagcgattatggaaccgttttattattactggtcaatgtggtttttatggatacttgcgacttttatttttgccaaaacaaaaagccgtttttacgtatcagtctttattttgactaatatgatggcaagcatacatcagataacggcttattttacgctgaacgcggcatatgtcatgttttttgctgcggcatttgtttatgcgggaagcctcggcatgcataaacggctccgtcatattgtgattcatctgacggcggctgcggcgtacggctttatttttctttttgcattatatgaccctgtttggtttatcataaaacctgaatgggcagcggttatactgcttaccgttattacgctttctgttgaggggcggttccctgagaggctttgtctttttgttctcggcatgtgccagggggagttattgtatgctgcggtcatccgcaacattgcgggggcagcagccgtcggtgattataaatggctatcaggctgttcggcgggagtgattcttctcgtcgggctgactacatatgaacagcttgcggcgcgcatcagccaaaaaagcaaaaagcagggcaaaggagcgacaaaaatgtcttgaaaacagacggagactgttacatgaatacgaaacattttgaagaatacattgtgatctcagtgaaaactgatataataaatgagttaagcccttctgtttgaagggttcttttcatagcgaagatgattattaataaccggttgaacaattttttgtgaaaatgtaagcggctggattgaaaggaagggtactatgggtaaacctgtcgtagccattgtcggaagaccgaatgtgggaaaatccacaatctttaaccggattgcgggtgaaagaatttcaatagtagaagatacccccggagtgacgcgggaccggatatacagttcggcggaatggctgaattatgattttaacctgattgatacgggcggaattgatatcggagacgagccgtttctgacacagatccgccagcaggctgaaatcgccatggacgaggctgatgtgatcatctttatggtgaacggccgcgaaggtgtgacgtctgcggatgaagaagtggcaaaaatactgtaccggacgaaaaaaccggtcgtattagccgttaataaattagataataccgaaatgagagcgaacatttatgacttttatgcgctcggctttggagaaccgtatccgatttcggggacacacggtttaggattgggagatttgctcgatgcttgtgccgagcattttaaaaacattccggagacgaagtacagtgatgatgtcgttcaattctgcctgatcggccgcccgaatgtcggaaaatcatcccttgtcaatgcgatgctcggcgaagagcgggttatcgtgagcaacgtagccggaacgactagagacgctgtggatacggcgttcacttacaatcagcaggaatttgtaatcgttgacacggcgggaatgagaaaaaagggtaaagtatatgaaacaacagaaaaatacagtgtgctgcgggcgttaaaagccattgaccgctcagacgtcgtcggcgttgtgctgaatgcagaagaaggcatccttgagcaggacaagcggatcgccggatacgcccatgaagccgggaaagccgtcgtcattatcgtaaacaaatgggatgccgttgataaggacgagcgcacgatgaaagaatttgaacagaatattcgggagcatttccaatttctcgattatgcgccggtgctgtttatgtcggcactgacgacaaagcggattcatacactcatgcctgcgattattaaagcgagtgaaaaccactctctccgtgtgcagacaaatgtcttaaatgatgtcatcatggatgcggtcgccatgaatccgactccgacgcacaacggctcccgtctgaaaatttattatgcgactcaagtcgctgttaagccgccgagcttcgttgtttttgtcaacgatccggaactgatgcatttttcttatgaacgctttttagaaaaccgaatccgggacgctttcggatttgaaggtacgccaattaaaatatttgcaagagcaagaaaataaaaaggtgtgatacagagatgaaaaaagtggcaatgcttggagcgggaagctggggcactgcactttctttagtgctggctgataacggacatcaagtcatgatgtggggacaccgtgccgaattgatcgatcaaatcaacgaactgcatgaaaacaaagattacctgccgggtgtggagctatcaagttctatcatcgggacagccgatttaagcgaggctttaaaaggagctgacttcatcattgtggcagtaccgacaaaagccattcgggaagtgctgaaaaaggctctgccgtatatcccgaaacaatcgatttttgttcatgtcagcaagggaattgagccggattcgcttctccgcatttcagaattaatggaggaggagctgcctgaggagtacagaaaagacatcgtcgtgctttcagggccgagccacgctgaggaagtcggattaagacacccgacgactgttacatcatcttcaaaaaatatcaaggctgcagaagcggttcaggatttattcatgaaccagcatttccgcgtctatacaaatcccgatatgatcggtgttgaaatagggggagcgttaaaaaatatcatcgctcttgcagcggggattacagacggattgggatacggagataatgcaaaagcggccttaatcacccgaggtcttgctgaaatcgccagactcggcacaaagatgggcggaaatccgctcaccttttccggcctgaccggcgtaggcgatttaatcgtgacgtgtacaagcgttcattcccgaaactggcgcgccggcaacctgctcggcaaaggatataagctggaagctgtcctggataagatggggatggttgttgaaggcgtgcggacgacgaaagctgcgtatcagctgtctcaaaaatatcaggtgaaaatgccgatcacagaagcgcttcaccaagtattatttaatgggcagaaggtagaaacggccgtagaatccttaatggccagagtgaaaacccatgagatggaagacttggtcaacacattcgaaaaccgggtgaagtgacaataacatgccgtcagcatattctgaagtgacgaaagtccaaaacgcagaactctccggctgaaatcgcttaaaacatttgctgatttaggcagaagaggatgcagacgtacgcatctacgcatactatagcatcgaagtccaagagagtgtatctcagacgtacaggtgaatatagtcaacttgactgaagcaaagtccccctctttgcttcagttttttgttttttcaatagatggaaaacctgttgatcttttcaacatttgtatattaaaatgaaatataacgcttacaatgatgggacggggggcacgaacgtgagtgtggcattgatgaaaatgtggtttgcgcttggtgctatgggattaatgtttgttgcggtcgcctttatttatgtcagcaggtacaaagtgaaaaacaaactgataaaagcagcggtttcttcactcgcttatgcctgcatggtcatctcgggattgatcgtgttaatggtcgttttcagcgggcctgtcaatgaataaagccaaaagggggcgcggaatgcataagttaaaaatggccgtcataacggcaatggcggtgcttctgctgtcgggctgtctgtaccctgaagcaaaaaaaactgaaaataaagtatcttacaaacatcagcttcagcaggtgcaagcggcagtggatgaatttaaaaaggcgaacggcggacttctgccgattcagacaaaagatatgaaaacaccgctctatcaaaaatatccgatagattttaagcggctcgcgcccagatacatagaggagccgccggcctcagcttatgaaagcggaggaatgtaccaatacgtgcttgtcgatgtggaaaataagcctaccgtcaagctggtcgatctccaaatggcggaagcaatccgcgacatgaagctgcgtgtcaaaatgtatcaggaaaagcatacatatcctccctatgaggacgctgtttcaaaaggcctgttcactttaaataaaaaaaagctcggcatgaaagactctccttcagtcaaaagtccggtttcaggcacgtctctgccgcttttaatcggcgctgacggagaaatctatgccgactatcgcgtcgatctcgcccgctgcctgaaggaaaacaaaaagaaaatcaaaccgggcgcggaaattcaggatattttatggaaagagactcctttcgtcccggccttttcagtcacttacaccgtaaatgaaaaacaggaacccgtttttttagaaagtcaaacgaaacaggaatgaacctttttcccgcgcatacaaatagggagaaaggtttttttgattttgatagaaaagactgcctgaaaattttctaaagatgtcatattgaaataggacaacgtcatacacatatagtgtcctgtatttgattggagaatggtgaatgaaaaatgataaggataggaagtccgggaggggatcacttggaaaaggtcgatattttcaaggatatcgctgaacgaacaggaggcgatatatacttaggagtcgttggcgctgtccgtacagggaaatctacattcattaaaaaatttatggagcttgtggtgctcccgaatatcagcaatgaggccgaccgagcgcgggcgcaggatgagcttccgcaaagcgcagcaggaaaaacgataatgaccacagaaccaaaatttgtcccgaatcaagccatgtccgttcatgtcgcggaaggacttgatgtcaacatccgtcttgtggattgtgtgggatatacggttcccggggcgaagggatatgaggatgaaaacggtccgagaatgatcaatacaccttggtatgaagaaccgattccctttcatgaggctgcggaaatcggtacgagaaaagtcatccaggaacactccacaatcggggtcgtcattacgacagacggctcaatcggcgatattgcgcggggcgattacgtggaagcggaagaaagagtcatcgacgagctgaaggaagtcggcaaaccgtttattatggtcatcaactcggtaaaaccgtaccacccggaaacagaagcgctcagagctgaattaagcgcgaaatatgatattcccgtcctcgccatgagtgttgaaagcatgcgggaaacagatgtgttaagcgtcctcagagaagcgctttacgagttccctgtgctggaagtcaatgtcaaccttccgagctgggtcatggtgctgaaagaaaatcattggctcagagagagctaccaggaatcagtgaaagaaaccgtaaaagatattaaacgcctgcgcgatgtcgaccgggttgtcggccacttcagtgaatttgagtttattgaaagcgccggattggccggaatcgaacttggccagggtgtcgcagaaattgatttgtatgcgccggatcatttatatgaccagattttaaaagaagtggtcggcgttgaaatccgcgggaaagaccacctgcttgaattaatgcaggacttcgcccacgcgaaaaaagaatatgatcaggtatcagatgcgctgaaaatggtgaaacagaccggctacggcattgccgccccggccttaaccgatatgagccttgatgaaccggaaatcatcaggcagggatcaaggttcggagtaaggctgaaagcggtcgctccgtccattcatatgatcaaagtggatgtggaaagtgaattcgcaccgatcatcgggacagaaaaacaaagtgaagagcttgtccgctacttaatgcaggactttgaagatgatccgctttctatctggaattccgatattttcggcagatcattgagctctatcgtaagagaaggaatctccgcaaaactgtcactcatgccggaaaatgcgagatacaaactgaaagaaacgctggagagaattattaacgaaggctcaggcggcctgatcgccattattttgtaagctgaaggacctcttcctgaaacggggggtctttttttattctttttagatactggaaatcaatcaaggattaggaggaaaaaagcaaaaaaaggaatatttgttcggtaaaacacgtgaaaaccttgacgagcaagggattgaggctttaaaatgcttgatatggctttttatatgtgttactctacatacagaaaatcttcactttgttggacaaacattcctcaaagtgtctgttttcttatgaaaagccgtttacttgtctgttcttccctgctttgattttttatcagacaggtttagaatcaggctgaactgtgaagaaatgataataaactgctgatttgatacccttttgggaggaggtgaaaggcatgaacaagacagaactaatcaatgcggttgctgaagcaagcgaattgtctaaaaaagacgctacaaaagcagttgattctgtttttgatacgattttagatgcacttaaaaacggtgataaaatccaactgatcggtttcggtaactttgaggtgcgcgagcgttctgcacgtaaaggacgtaacccgcaaacgggtgaagaaatcgaaatccctgcaagcaaggtacctgctttcaaaccaggtaaagctcttaaagacgctgttgcaggaaaataattgtgaatatagatcgtgtatgcatctgatacatacactttgtttcttcacagaaaagccccttgataaaggggcttttcatatttaagcagccccggtcaccgggcaggactttcgttttgcttttggcgcggcaaatgtgctagaatcgaaattaaatgtattcaatggtggaggacacagacaatgaaagaagttaataaagaacagattgaacaggcggttcgccagattttagaggcgattggagaagatccggaccgggaagggcttttagatacgccgaaacgcgtggcaaaaatgtacgcggaagtattctcgggattaaatgaagacccgaaagaacactttaaaaccgttttcggagaagagcatgaggagcttgttcttgtaaaagatatcgcgtttcattccatgtgtgaacatcaccttgttcctttttacggaaaagcgcatattgcctacattccgcgcggcggcaaagtgacgggcctgagtaaattggcgcgggcggtggaagccgtctcaaaacgcccgcagctgcaggagcgcattacttcaacgattgcagaaagcatcgtagagaccttagatccccacggcgtcatggttgtcgtcgaagctgagcatatgtgcatgacgatgaggggcgtaagaaagcctggcgcaaaaacagtgacttccgctgtaagaggtatttttaaagatgacgcagcggcgcgttccgaagtgttagaacatattaaacgtgcggattaataatgatagagggtgcagatatgaattcaaagcattcaagtgattttgtcgtcattaaagcggtcgaggacggcgtgaacgtcatcggtttaacgagaggtacggatacgaaatttcaccattccgaaaaactggacaaaggcgaagtgattatcgctcagtttactgagcatacctctgccatcaaagtgagaggcaacgccctcatccagaccgcttacggagaaatgaacagcgaaaaaaaataagccggctgtttcccgcttttgccaattgcccgcaaacggcgggagaatacagccaatttcttttttttatgctataatgatacctgcgtataataatgacgagtaaatctcatacatattagaataaatgtgaatttggggacaagggtgatatttttgcaagacatctacggaactttaacgaatctaaatacgaaattaaaacaaaagctgtctcatccttatttagcgaaacatatttccgcgcctaaaatcgatgaggataagcttcttctttttcacgctttgtttgaagaggcggacattaagaacaacgacagagaaaattacatagtaactgcgatgcttgtccaaagcgcccttgatacccacgatgaagtgacaacagccagagcgttaaagcgagacgaaaataaaaaccggcagctcaccgtgcttgccggcgactatttcagcggactgtattattcgcttttatctgaaatgaaggatatctatatgattcggacgctcgctacggcaattaaagaaatcaatgagcataaaatccgtctgtacgatcggtctgtcaatgacttgaatcaattgatcgaaagcatggcgattgtggaagcggccctgtttcacagagtgtcagaccactttaatcttccgcgctggaaagagctggcgagtgatttttttgtatataagcggctgatgaacggcaatgctatatttctcgatgtcatcggcaatattgtaaagtcagggaaatcaaaggctgacataatggaagatagcttccgaaaggcaaagcaaagcattgaaacgctgctgccgctcaattcaccaatccaaaacctcatgctgaaccggctcaaagcgatcagccaggacaaaacatatcatcagaaagtggaagaagggtaatcaacatgcaggagtcaaaagaacagcgcgtacacggcgtgtttgaaaaaatctataaaaattatgaccaaatgaactctgttatcagttttcagcagcataaaaaatggcgcgataaaacgatgcagatcatgaatgtaaaagaaggcgcaaaagcgcttgatgtctgctgcggaacggctgactggacgattgccctcgcagaagcagccggaaaaagcggcgaaatcaaaggactggatttcagcaaaaatatgctgagcatcggcgagaaaaaagtgaaagagggcggttacagccaaattgagcttttgcacggaaatgcgatggagcttcccttcgctgatgattcttttgattttgtcaccatcggcttcgggctgcggaacgttcccgactatctgaccgtgctgaaagaaatgcggcgggtcgtcaaaccgggcgggcaggttgtatgtctggaaacatcccagccggaaatgttcggattcagacaggcatattttctatattttaaatacatcatgcctttcttcggaaaaatgtttgcgaagagctataaagaatattcttggcttcaagaatcggcaagagaatttcccggtatgaaagagcttgcgcgtctgtttgaagaagcgggcctgacgaatgtcaaataccattcgtttaccggcggagtggccgctacgcatatcggttggaaatgatgaatatacagatgtttgggtgaatgatatgaaatttaaaatggcctattcttttttaaatgacgatattgatgtgatcgaaagggaacttgagcaaacggtgcggtcagactatcccttgctgagtgaagccgggctccatctgctccaggcgggaggcaagcggatccgccctgttttcgtattgctttccggcatgttcggcgactatgacattaataaaataaaatatgttgcggtgacgctggaaatgattcatatggcgtccctcgtgcatgacgacgtcattgatgacgccgagctgcggaggggaaaaccgaccatcaaagccaagtgggacaaccgtatcgccatgtataccggtgattatatgcttgcgggctcacttgagatgatgacgagattggatgagccgaaagcccaccggatcctgtccaaaaccatcgtagaagtatgcctcggagaaattgaacagatcagagataaatacaatatggaacaaaacctcagaacctatttgcgccgcatcaaacggaaaacggctcttctcattgccgtcagctgccagctcggcgccatcgcttcgggagctgatgagaagattcacaaagcattatattggttcggctattacgtgggcatgtcctaccagattattgacgacattcttgatttcacttcaacggaagaggaactgggaaagccggtcggaggggatctgctgcaaggaaatgtcactctgcccgttttgtacgcgctccgtcagcctgaattgaaaaatcagctgaaattaattaacagtgaaacaacacaggagcagctcgcccccattattgaaaatattaaacgcacagacgcaattgaaaaatcaatggccgtcagtgacaggtacttaaaaaaagcgtttgaaaaactgaatacactgccgagaggacgggcgcgctcatcattggccgccatcgccaaatatatcggcaaacggaaattttaaattccttttacgaacaagatgtgaacattctccgccctggattgattaattgtcagaaagatgttacgatttcggtgtgcaacttgaaagcctatacataatgatggggtggagaatcttatggaaaaaacttttatcatggtaaaaccggacggcgtacagcgccagctgatcggagagattttatccagatttgagcgtaagggcttacaattggcaggagccaagctaatgcaagtttcagaacagatggctgaaaaccattatgctgaacataaagggaagccgtttttcggcgagcttgtggaattcattacatcaggacccgtatttgcaatggtatgggaaggggaaaatgtagtagagatcacaagacagctgatcggaaaaacgaacccgaaagatgcactgccgggcacgatccgcggtgactacggcatgtttgtcggcaaaaatatcattcacggttcagactccttagaaagcgccgagcgggaaattgacattttcttcaaacgggaagagcttgtaccgtatcaaaaattaatggccgactgggtgtactaagccgtcagcctttctttttctcttgttatgaaaaggtttacatattttaagaaagacagaggctgcgctgccctgtcttttcatttctcacaaatcagcctgcgggctgatttttttattgaaatcgtacaaattagaaagaaaacaggctatactaggacaaaagacagcgagattgggagagaagcaatggagccttacgaaatttttatcaccaagtggaaacaaataaccggcgttgatttatctttatacaaagaagcacagatgaaaaggcggctgacgtccctttatgaaaaaaagggattcaaagattttcaggaatttgccgccgctttggagaaagacaagcttttattaaatgaaacattggacaggatgacgatcaatgtttctgaattttaccgaaattataaacggtgggaagttcttgaaacctcaattcttccgttaataaagcataacaaaccgttaaaaatatggagtgcggcctgttcaacgggggaggaaccctatactttggctatgattctcagtcagcaggcgggtttggccggatttgatatattggcgacagatattgatgaaaaggcgcttggcaaagccaagcggggcatctatcaggaacgctcgctgcaagaggtgccggcttccgtgaaaagccgttatttcaccaagcaggctgacaacagttatcaagtaaaacaagagattcaaaaaaacatccggtttaagcggcacaatctgctcgccgacagctatgaacaggattttgatctgatcgtctgccgcaacgtctttatttattttactgaaaaagcaaaagaagagctgtatgtaaaaatggcgggcagcctgaaaaagaacggaattctgtttgtcggaagcacagagcagattttcagcccggaaaaattcggccttgagagcactgatacatttttttatcaaaaaagatagaagacatttaatgaaaacttgtggtatagttttacttaaaagcgttaatgcgatgaagggagaagaaagaaatgagatacttaacagccggagaatcacacggcccgcagctgacgacaattatagaaggtgtgcctgcggggctttatataactgaagaagacattaattttgagcttgccagacgtcaaaaagggcacggccgcggacgccgcatgcagattgaaacggacagggcgaagatcacaagcggcgtgcggcatgcccggacactcggttcacccatcgcgctcgttgtagagaataaagattggactcactggacaaaaatcatgggcgccgcaccgattacagaagaagaagaaagtgaaatgaaacgtcagatttcaagaccgagaccgggacacgcagatttgaacggggctattaagtataatcaccgtgatatgagaaatgtgttagaacgatcttccgcgcgtgagacaacggttcgcgtggctgccggagccgtcgctaaaaagattttagcggagcttggcattaaagtcgccggacacgtcctgcaaattggcagcgtaaaagcagagaaaaccgattacacatccattgaggatctcaaacgggtaacggaagaatcaccggtgagatgctacgatgaagaagcaggccgtcaaatgatggcagccattgatgaagcgaaggcaaacggcgactcgatcggcggaatcgttgaagtgatcgtcgaaggtatgcctgtcggtgtcggaagttatgtccactatgaccgtaagctggacagcaagctcgctgcagccgttctgtcgattaacgcgtttaaaggcgtagagttcggcatcggttttgaagcggccggcaaaaacggcagtgaagttcatgatgaaatcgtatgggatgaagagaaaggctatacacgcgccacaaacaggctcggaggattagaaggcggtatgacgacgggaatgccgattgtcgtccgcggcgtcatgaaaccgatccctactttgtataagccgctgaaaagcgtcgacattgaaactaaagaaccatttacagcgagcattgaacgttcagacagctgcgcggttccggcagcaagtgtagtggctgaagctgcagtggcctgggaaatcgcaaatgccgtcgtagaacaattcgggcttgaccagatcgaccgcattaaagaaaatgttgaaaacatgaaaaaactatcgagggaattctgatgaaagagcttgaggttcggacagcttcctccgcatatcccgtgtatatcggtgaaggcataaggaaacaggccgctgctcttttgtcttcactgaacaggccgctgacaaagatccttctcgtcatcgatgctgaagttgaccggctttacggcgatgagatgttccggcttttaaacgaaacatggcccgtgaaaaaagtaatcgttccaagcggagaagaagcgaagtctctaaaagagtatgaacggattcaaacggaagcgatcgctttccatatggaccgctcctcatgtatgatcgccttcggaggcggcgtgacgggtgatttgaccggcttttgcgcagcgacttttatgcgaggaattgatttcattcaaatgccgacgacactgcttgcccatgacagcgcggtcggcggcaaggtggccgtcaaccataaactcggaaagaacttaatcggcgcgttttatcagccgaaagcggtgatttacgatacggagcttctgaaaaccctgccggaacaagagctgagatcgggcatggctgaagtgatcaaacacgcgtttatcgccgatcatgcttttttagaaaaacttctcacgtttgacacgttgcaaggactgacaagcgctgagctgaatgaaatgatttataaaggaatttcaatcaaatcggccgtcgtgcgtgaggacgaaaaggaagagggcataagagcttttctgaatttcggccatacgctcggccatgccgttgaggcggaatacggctacggccggattactcatggagatgcggtcgccctcggcatgcagtttgccctttacgtgagtgaacaggttgcgggttgcaagatgaacaggaaagaactcacacaatggctgattgggctcggctacccgggaagtatcagacaagatattgaaacgccggttctctccgcccggatgatgaatgataaaaaaacgcgcggaggcatgacacagttcatcgtgttaaaggaattaggggaagcgcgggactgcatgctttcaaaagatgagctcgaaaatttgctgaacaaatggcgaatggaggaaacagcatgatgatacgcggcattcgcggagcaacaacggtggaacaagacaccgaacaagaaattttagaaaaaacacagcagctgcttgaaaaaatcattgaacaaaatggatgcaagccggaagacgttgtacagatcctgttatccgccacgcctgatatccattccgtatttccggcaaaagcggtccgccgcctttccgggtggcagtacgtcccggtgacgtgcatgcaggaaatggatgtcaccggcgctctgcaaaagtgtatccgtgtcctgatgacggttcagacggatacgcctcaggatgaaatcaagcatgtctatttagaaaaagccgttgtgttaaggccggatttatcattgacaaaaaatactgacatgtaatacgataaacaaagcttagaaatacacaagagtgtgtatagagctggtaagtaagatattgaacagttgagtttagaatagggtagcagagaatgagtttagctgagctgagataaacacgtttttattctgcccaaaagaagcctttcttttgggtttatttcttatacgcaagactcctctcactcttcatctcattctccttaccgtaaggaggagaatcatgaatttacaatcggatgtttctttatttttaaaggacagtctgacacaccgcaccattccaatcgcagagacttttacggtcgacacgatcacacccattcagatggttgaaaaactggacagaaacattacgtatcttttagaaagcaaggatgagtcgtcaagctggtcgagatactcttttatcggcctcgatccttttatcacgattaaagagagtcatcacacattcactgccgctgatccaaacgggcatacgctgtttgaagccggagaattaaaagccgtgcttgattggatgaatgaaagcttccgcattaaaacacccgagcttgatatcccgttttcgggaggggccgtcggttatctgagctatgacatgatccctttgattgagcctaccgtgccgagccacgcgaaagaaacagatttcgaaaaatgcatgctgtttgtctgccggaaaatcatcgcgtacgaccacgaaacgaaacaagtgcatttcattcaatatgcggcgcttaacggccgggagacggaggaagaaaagcgggccgtttttaaagaaaattgcgcggagcttcgtaagcttatcggtattttgacagaaccgaaagatatgaaagagccgtttttttctaaagaaacatttgaaacgccaagttttgccgatatgacatctaattatacgaaagaagagtttatggccggcgtcaataaactgaaagaatatataaaagccggagacatttttcaaggggtgctttcgcaaaagtttgacattccggtatccagacattcatttgagctgtacagggtgctccgcatcgtcaatccttcaccttatatgtactatatcaaactgcctgacagagacattgtcggaagttcgcctgaacgtctgatccgcgtggatgacagacacctggaaattcatccgattgccggaacgagaagaaggggcgccggaaaagaagaggacgatcgcctcaaaaaagagctgatgaatgacgaaaaagagaaagctgaacattatatgctcgtcgatcttgcgcgcaatgacatcggcagagttgcggagtacggttccgtagccgttccggaattcacaaaggtcgtttctttttcacatgtgatgcacatcatctctgttgtaaccggccgtttaaaacagggcgtccatccggttgatgcgctgatgtcggcattcccggcaggaacactctcgggcgctccgaaaatccgcgcgatgcagcttttaaatgaattagaaccgacttccagagaaacctacggcggatgtatcgcttatatcggatttgacgggtcaattgattcgtgtatcaccatccgcaccatgagtgtcaaaaacggtacggcgtcggtgcaggcgggcgcgggaatagtcgctgattccgtcccggaagccgaatatgaagagagctgtaacaaagcgggggcgcttttaaaaacgattcaaatcgcagaagacatcttttctggcagggaggagaagacggatgaacaaatttctgcaatcgtgcgttaatggccgcacgctgaaaaccggagaagccgaaaagctgatggagatgatgatgaacggggccatgtcgcagtctgagatcggggggattttatcggtattagcccaccggggtgaaacggcggaggagcttgccggatttgtaaaagtgatgcgggcgcgggcacagacggcgggtggcttggcggatgtcgttgatacgtgcggaacaggcggagacgggatttctacgtttaacatatccacggcagcggcgattacagcttctgccgccggagctaaagttgccaagcacggaaatcgctccgtttcgtctaaaagcggcagcgcggatgtgctggaaaagctgggggtttccattcaagccactccagaaagcgtcaaacgcagcattgaaatgaaacaaatggggtttttgtttgcgccgctgtttcattcgtcaatgaagcacgtcgccgccgcaagaaaagagcttggcttccgaaccgtatttaatctgctgggcccgctcagcaacccgctgcaggtgaagcggcaggtgatcggcgtctattcatttgataaagcgcgcctgatggcaagcgctttggaacaatttgatgtcagacacgtcatgcttgtgtcggcgcgtgacggattagatgaactgtccatcacagcaccgacagatatcattgagctgaaaaacggtgaacgtctggaatattccgtttcacctgaacaattcggttttgcagaaggttcattgaaggatattcaagtgagttcatcggaagaaagcgcgcttctcattcagaatatttttgcaaatagagctccgtcatccgctctgcatattaccgccttaaatgcgggcgcggccatttatacggcaggtcttgcaaacgatctgaaagaaggaacgaaaacagccttagaagccattcaaaacggagatgccaaaaggcagctcgaacgtctgaaacagaaagaggaagaaatgtatgcttgatcaaatcattctgcagaaaaaagaagaaatcaaatccatcgtgctgccggaaacctgtcaaattgaacggagatcctttaaagaagcgctcctgaacccgaaccgttttatcgggctgattgccgaagtgaaaaaagcttcgccgtctaaaggattgattaaagagcattttgttccggaaacgattgcggcggattatgaagcggctaaagccgacgccctttcggttctcacggatacccgtttttttcaggggagaaatcaatttctgacagatgttaaacaaaccgtgtctcttcccgtgctgagaaaagattttattattgattcccttcaggtggaggaatcgttcaggatcggcgccgatgccattttgctgatcggggaagcgctggaacctccaaagcttcatgagctttatctggaagcccgcgggaagggcatggacgttctcgttgaagtccatgatgaaactgtgcttgaacggattttacaagtgtttcagccggacattctcggcataaacaaccgggacttaaaaacgttccgtacttctgtttcgcaaacggaaaaaatagcgcagcttgtgccggacggctgcctgctggtcagcgaaagcggcatcggttctttggctgacctgcaattcgtcaacaagcacggggcgcaggctgtattggtcggagaatccttaatgagagaggattcgcagcaaaaggcgatccgcggactgttcggagagtgacgatatgaaaaagcctgagttaaagtactgcggaatacgatcgaagcgtgattatgaacttgcggcagcttcagaagcggattatctgggatttatttttgccgcaagcaaacggagagtaacgccggatgaggtccggaaatggaaagagcaggtccggacagacaagaaacatgtcggagtatttgtaaatgaaacgatagaaaacatcgcgcaaatcgcatctgatctggcacttgacgtcatccagcttcacggtgatgaatcgcctgaggatgcccttcgcctccgtccgcttgtgcgctcggaaatatggaaagcgctccatcacggggaagggacgctccgtcagatggctcaatttacacctgctgtcgacggctatgtcattgattcttcagtgacaggaatgagaggcgggacgggaatcgcgttttcatgggcccgtgtccccttgtaccgaaagcaggctcaaaatgcaagcaagcgctgttttattgcgggcggtgttaatcctgaaacgattaccggcttactgagaacgcgtccgtgcggtatagatcttgccagcggaattgaaaaaaacggacacaaggatcaaacactgatccggcttttagaagaaaggatgaaccactatgtatccatatccaaatgaaatcggaagatacggcgaattcggcggcaaatttgtccctgaaacattgatgcggccccttgaggaaatcgaaacggctttcacagaattaaaaaatgatcctgtttttcatgccgaatataaaaaactattgtttgattactccggaagaccgactgcattaacgttcgcagacagggtgtcagagtatttgggaggggcgaaaatctatctgaaaagagaagatttaaaccataccggctctcataaaattaacaacgcgttaggccagattctgcttgctaaaaagatgggcaaaacgaaaatcatcgccgaaaccggtgcgggacagcacggtgtggctgccgcgacagccgccgcaaaattcggttttaaatgtacggtttttatgggtgaagaagacgttgcgcgccagtcgctgaacgtattccggatgaaactgctcggcgcggaagtggtgccggtcacaagcggcaacggcacgctgaaagatgcgacgaatgaggcaatcaggtattgggtccagcattgtgaagatcatttctatcttatcggttctgtagtgggtccgcacccatatccgtatatcgttcgcgaatttcagaaaatcatcggcgaggaagcgaaagaacagctccgccgggttgaaggaacgctcccggacaaggttgttgcatgtgtcggcggcggaagcaatgcgatgggcatatttcaggcctttttagacgaagacattgagctgatcggcgccgaggcggccggaaaagggattgatacgccgctgcatgcggcaacgatcgcaaaagggacgctcggggtgattcacggatcaatgacctatttaatacaagatgaatacgggcagattatcgaaccgtattccatttcagcaggccttgattacccggggatcggccctgagcacgcctatctgcacaaaagcggccgtgtaacgtacgaaagcgtgacagacgatgaagcgattgccgcgttacgtctgctttctgaaacagaaggtattcttccggctattgaatctgcccacgccctggcaaaagcgtttgaaatggcaaaggacatggataaagacaaaatcattctcgtcagtttgtcgggaagaggagataaagatgttcatacgctgatgaatgttttggaaaacggggtggagacacatgtttaatctgcgagattctgaaaaattgtttatcccttttatcacagcgggcgatccgcttcctgacatttctgttgaactggcaatatcattacagaatgcaggcgcttctgcccttgaaatcggcgttccttacacagatccgcttgcggacggacccgtcatacaacgggcttcaaaacgggctctggaaaacggaatgaatatcgtaaaagccattgaacttggcggcaaaatgaaaaaaaacggcgttcatattccaattatcctctttacgtattataatcctgtgttacaattagaaaaagaatactttttcgctttactgcgggaaaacgacatagacggcctgcttgtacccgaccttccattagaggaaagcgcccttttgcaaatgacatgcaaaaaggagaacatcgcttatatctcgctggttgcgccgacaagtgaagaccgtttgaaaataattactgaacaggcctgcggctttgtgtattgtgtatcctctttaggagtgacgggcgtacgcagcgaattcgatccgtctgtatactctttcatccgtaaggtgaaagaattcagctctgttccggtggcggtcggttttggcatttcaaaccgcaaacaggttgacgggatgaatgaaatatctgacggtgtcgttgtcggcagcgcgcttgtcaaaaaagttgaagagcttaaaacaaagcttgtgaatcccggcacaagagctgatgcgcttcttgaatttgaagaatacgcgaagacgttcggacgactgtacagtgtaaaatgaggtgactggatttgcagattaaagaacagctgcggcagctgaaaccgtatcagccgggcaaaccaatagaagaagtgaaaatggaatacgggcttgaaaaagtagtaaaactcgcttctaacgaaaatccgttcggctgttcacaggccgcaaaagatgcgctgcatcaggagattgagcagcttgcgctgtatcccgacggttacagtgccgctttgagaacgcggctcagtgagcatctgcaggtcagtgaatcttcgatcattttcggcaacggctctgatgagctagtgcagattatctgccgttctttattaaatgatcaggcaaacacgattaccgccgccccgactttcccgcaatacagacacaatgcggtgattgaaggcgctgaggtgcgcgaggtgccgctccgcagtgacggcgctcatgatttagaccggatgctggaagcaattgacggcgagacgaaagtcatatgggtatgcaaccccaataatccgacggggacatatacttctgagcaagagttaattgcctttttaaacagagttcccgagcatatactcgttgtacttgatgaagcgtactacgagtatgttacggcggacgattaccctgaaagcatcccgcttttaaagcaatatccgaatgtcatgatcctccgcaccttctctaaagcgtacggacttgccgcgctgcgtgtcggatacggcattgcggacgaagcgctgatccgccagattgaaccggcgagagagccgttcaatacgagcagaatcggtcaggcttcggcactggcagcgcttgacgaccacacatttattcaggaatgcgtcgagaaaaataaagcgggccttaagcagtattatgattttgcggaaactcacggattaacttgttatccttcacaaaccaactttgtgctcattgattttaaccgtccggcggatgaactgttccaagccctgttggaaaaaggatatatcgtccgttcaggacaggcgctcggatttccgacagcgttaaggattacggtcggtacgaaagagcagaatgaggaaattctcacaatcttagctgaaatattataagaggtgatcaagcatcacctctttgctctattaaaatagttgaaaaaggaaatgagtgaaatgaaggatactatattgcttgcggggatcgggctgatcggcggatcgatcgcattggccatcaaaaaggagcatccgcataaacggattatcggtgtggatatttcggaagaacagctcactgccgcgctgaagctcggaattattgacgagcgggccggctcattgacggaaggggcgcagcaagcgtctgttgtcattatcgccacgcctgtcgcccaaacgctgaaaatgctcgatatgctggccgcatcagacatcacccatgaactcctgattacggatgtgggcagcacgaaacagaaagtcgtcagctacgccgacaaagtgcttccggctcattatcaatttgtcggcggccatccgatggcggggtctcataaatccggggccgctgccgccaaagaatttttattcgaaaatgcgttttacattttaacacccggaaaatcaacttctaaagagtcagtaacgcatctgaaggagcttttgaaagcggcaaacgcccactttgtggagatgactcccgaggagcatgacggcgtaacgagcgtcatcagccatttccctcatatcgttgctgcaagcctcgtccatcaggctcatcattctgaagaaaattatccgtttttgaagcgtttcgcagccggcggttttcgggacatcaccagaatcgcctcaagcagtccggcgatgtggagagacatacttcttcataacaaagataaactgcttgaccgcttcaaagaatggaaacgggagattgacacgatcgaatcttatgtagaaaatgaagatgcggacagcctgttcggatattttaaaaaagcgaaagattatcgcgacggcctgccgctccgtcaaaaaggagcgatcccgtccttttatgacctttatgtcgatgttcccgatcatccgggggtcatttcggaaattacggcgatactggcagaagaaaaaatcagtatcaccaacatccgcattatcgaaacaagagaagatattaacggaattctcagaatcagtttccagactgatgatgaccggaagcgcgcggaaacctgcattcaatcccgcgccaaatatgacacattttacgctgactgaggtggaaaacattgaaaagagaaaaagtgacgtctttaaacggtgaaattcatattccgggggataaatccatctcccaccgttctgttatgttcggagcgcttgcggaaggaacgacaacggtaaaaaactttttgcccggagccgattgtctgagcaccattgcctgcttcagaaaaatgggtgtctccattgaacaaaacggaagtgatgtaacgatatacggaaagggcattgacgcactttgtgagcctgacagccttcttgatgtcggaaattccggcacgaccatccgcctgatgctcggcattttagccggacgcccatttcacagtacggtagcgggtgacgaaagtattgcaaagcgcccgatgaagagggtgacggagcctttaaaacagatgggagccgcgattgacggaagagcggacggagggtttacgcctttatccgtaagaggcggacaattgaaaggcatagattacgtctcccctgttgcaagcgcgcagatcaaatctgccgtgctgcttgccggattgcaggctgaagggacgacgaccgtcactgagcctcataaatcaagagaccatacggaacggatgctgaacgcttttggcgccgagcttgcggaaacggagacgagcgcttccgtaacgggcggtcagaagcttcggggagccgatattttcgtgcccggcgatatttcttcagcggcctttttcctcgcggcaggcgctgtcgttcccggaagccggattgtgctgaaaaacgtcggcctgaacccgacacgcacgggaatgattgatgtcttaaagcaaatgggggcttcacttgaagtgattccttcagaagcggacagtgcggagccttacggagacctggttattgaaacctcagctctgaaagcggcagaaatcggcggagaaatcattccccgtttaattgacgagatcccgattatcgcccttttggcaacgcaggctgaaggcacaactgtcattaaagacgctgcggagctgaaggtgaaggaaacgaaccggatcgacaccgtcgtatcagagctccggaaaatcggcgcagacattgaaccgactgaagacggcatgaaaatacacggcaaaaaaacgcttgcgggcggagccgatgtgtcaagccacggcgaccaccgcatcggcatgatgctcggtatcgcttcatgcctgacagaagagccgatcgacatccgtgatacagaggcgatccatgtctcatatccgacattctttgagcatttagatcaattagccaaaaaagcctgaagacgattcttcgggcttttttcttcatgtgtcataaaatcttgggctttgacatagcttgtcttaaacagaaaactaaaagaaagggggaatgcgttttcgttacagaaacagccggaacaaattgcgctgtttgcgtataaagatgccgtccccttttttgccgttttcctcttaaccattttctgataaactataatgccgggtgaagcatcttatttgcgggcaggccctgtctgaattatgataagaataacccgaataaaaacccttttcatttggttgatgaggtataggaaaagaaaggaccggtctgatttgaatacattgattcaagaagccataaaattagttgaagcaggtgaaaccgaaaagggactcaaagcgctttcaaaagctgaaacagagcttcatgacgaagacaaagccattgcagcccagctctactatgaatggggaaacgccgaaaaagcgttagcgctgatcagtgatctgcatgacctctatccgggtgagtctgagctgacgaatttttacgccgaattgttaatagatattgatgaagaagaaaaagctcttgaggtgctggagacgatttctccggaagacccgtcttacgcggaaagcctccttttaatggctgatctgtatcagatgcagggcttatttgaagtaagtgagcaaaagctgttacaggcgaaagcgatgttacaagatgaacctgttattgatttcgctctgggggaattatacttcactcagggatcatatgcaaaagccgttccttactatgaagagacggcaaaagaacggcacgaaatcggcggcgtaaacgttcatcagaggctggctgagtcattgagcgcggcgggtgaatttgaggaagcgatttcatggtatgaaaaagcggcggcagaacatacagaaccgaatacgattttcgggtacgggttcacagcctatcaggcgggaatggtcaaaacagccatcaagcagctgtctgatttaaaagggcttgatccttcctattcatcgctttatatgccgcttgcaaaaagctacgaggcagaaggcatgtatgaagatgcattaaaaaccgctaaagaaggtattacttacgatgaatacaataaagagctttttctctatgcggcgaaaatggcgttaaagctcggcagcgaagaggaaggcaaaaagcttcttcaggaagcgctggcgctcgatccgggttacgtggaagcgctccatacgcttttagccgtctatcataaagaagaaagctttgaagagattattgatctgattcaggaagtccgcggctacggagaagaagatccgaaatacaattggtatttggcgggggcctatacaggcctggagcaatacgctgaagcgaaaaaaagcttcgaagctgcgtatctccattatcaggatgatcgggatttcttatatgaatacgctcacttcttattggaagagggtctccagaaagaagcgctgccgcttttaaaacaagtgctttcaatggatggaacaaacgaagagcttgaagaaacaatcttacggatagaggatgaatttttaagataagcaggattttggaccatgcttgctgaatgtataagtgatgtcagattatacgatcgatagaggagggaattacatgcagacccctgtttctgtcaatgaaaaaaaggattttatccgttggtttttaaatcattatcagcttaaacgccgggagtgcgtctggattttaaattatttaatgagtcatgattcattaatggaaaaagtccattttgtagaacaagccgaattttgcccgagaggcattatcatgtctactcattgcgttgatgaggtgccgtttaggttttacaaagaaaatgtcatgactacggacgcggaaaaatcttttcacgacatccggttaaataaacagcaggatttatttatccagctgaatttccgttcggcctacagctcaccggaatatgccgctgttcttgaatcaaatccgcatctgccgaaagacctgtttgaaaataaacaggatcaggggatggctgaaaaaatattagaacatgccatttccactttccagcgggaaaagctgcttaaagatatcgacgaggcgctggaccgccacgacaaagaaacatttgaaaagctttcccgccaattgaatcagctcacataaatgacagccttgcagaatatgcaaggcttgttgcgtaaagaggaggaacgagacatgagatggagggccgctgatgccgatgcctatttacaatctgcggattacattgataccgctgtcattccgttaatttccataacgtcttcaggaggcttaaaagaggccgttgaacagggggaaagcacccaattgctttctgaagagcttgagcgccaattgaagggacgggtatatttattcccctcttatacatatgttgatatagaccaatcacaaatcgccctgcttcaaaaactcaaagaagaggtgatgaccaacttcaggcacgccttgttcctgacggcagacgaaaaatggaaggattctgaaatagggtctgatgtcatatacatacctgccgttccgtttgaacatatgaaagactctttaaagagaaaaattgcggatgacaagtgcggagaaattttgaacgttttgttacagaagtggaacaattcttaaaaactccaggcatcctgcaaaacacccgttttgcctctgttgaccttgctgaaagattcatatattatgagggtgtcaaatctcagaattattttctattttagttaatttttggtcaatctttagggggggaagagatgggcggaaaacaagatatatcaagaagacaatttttaaactatgcgctcaccggcgtggggggatttatggccgccagtgcgcttatgcctatggtccgttttgcgctggatccggtattaaaaccgacgggagatcaaaaaatggtgcaggttgtcagtgtggatgagctgacgaaggagccgaagcggtttgactttaaaattcatcaagtcgacgcctggtacgaatcggaagaatccaggtcagcctgggtttacaagcatggggatgaaattatagcgctttctccgatctgcaagcatttgggctgcaccgtaaactggaacaatgatcctaaaaatccgaacaaattcttttgtccctgccattacgggctgtatgaaaaagacggcacgaacgttccgggcacgccgccgctcgcgcctcttgaccgttatgagcaaaaagtaaaggacggctttttgtatcttggaaaagcaaagcctaggggggaagggtgacatgctgaataaaatttatgactgggtggatgaacgtctcgatattacgccgatgtggcgggatatcgccgaccatgaagtgccggaacatgtaaatcccgctcaccatttctcggcttttgtctattgtttcggcggtttgacgttttttgtaaccgttatccaagtgctctccgggatgtttttaacgatgtattatgtgccggatataaaaaacgcgtgggaatctgtgtattatttgcagaatgaagtcgctttcgggcagattgtaaggggtatgcaccattggggcgcaagtttagtcatcgtgatgatgtttttacatacgctgcgggttttctttcagggagcttataaaaagcctcgggaattgaactggatcgtcggtgttctgatcttttttgtgatgctcggtctcggatttacagggtatttgcttccgtgggatatgaaggcgctgtttgcgacaaaggtaggtcttcagattgccgaggcgacgccattgatcggagcgcaggtgaaaactcttcttgccggccaccacgatattgtcggcgctcaaacgctgacgagattttttgcgattcacgtattttttctccctgccgctttgtttgcgctcatgggcgcccactttgttatgatccgcaagcagggaatttcaggaccgctttaatacaaatctgatataaaagggaggggatgacatgcaccgggggaaaggaatgaagtttgtaggagattcaaggataccggctgaaaaaaaaccgaatataccgaaagactattcagagtatcctggaaagacagaggcgttttggccgaactttctgctgaaagaatggatggtcggggccgttttcctcgtcgggtttctcgttttaacgattgtgcacgagccgcctttggaacgggtggcggatcctacggatacagggtatattccgctgccggattggtattttctatttttataccagcttttaaaatatgaatatgccgcagggagctacaccgttatcggagcgatgattataccggggcttgccttcgggtcgctgcttttggctccgtttctcgacagggggtctgaaagaaggccgtggaagcgtccggttgctgtcgggatgatgcttttggcgctttgcgctacggtctttttaacgtggcagtcagtcgcgacacatgactgggcaaaggcggaggagcaagggaaaattaaaaaagaagccgccattgatactgaatcagacggttataaggtatttaaagaacaaggctgtatttcctgtcacggggataatcttcaagggggaggcgccggtccgtccctggtcgataacgggctgagcccggaagaaattaaaaaaatcgccgtcaaagggaaagggcagatgccagccggtatttttaaagggaatgacaaacagcttgatcagctggcgaagttcatttctgaaacgacagcgaaataacgtattgtgaagtagacaacagcaggatatactttatgaaaagagctgaccggatgtcagctttttttgcatgatacatactttttacggactgagagttgatggtatgaggtggatttcttatcttttagggttgcgcggcatgcttctgcttgttcttgccgttaattttatcggtacggtgtacggctattattggtatgtgccgcagcttgcggacacgccgttccgatttctgatatttgtgcctgacagcccgacggcgacgtttttcttcctgtttgtgcttctggcatttctcatgggaagaaacgcgccgctgtttgaagcgctggctcttgtaacccttgtaaaatacgggctgtgggcggtcggaatgaatgtctttgtgctggtcaaaatggggcagatgccttgggaagggtatatgctgattgcttcacattttgccatggccgttcaaggcgttttatacagcccgtattttcggttccggttatggcatcttgccgttgctgctgtttggacgcttcataatgacgtcattgattatcttttcggcatgatgccccgctactcaatgctcaatgactatatgcaagagatcggctatgctacattctggctgagcatattttcactcggccttgcatactatttggtgatttctaaaagacggataaagcttgacttacactgatagaatcttggtctaaccttgtcccgctcctcatattctgtaaagagaaggagtgggagggacctctatgaaacgaaagctgacgatctgtcttttacttgctcttatgtgtttcatcacaactgccaaagctgaagatgagggcggtctcaaggaactgaacgacctttcggataccgttttccaaatgacgcggcattcgcagtatgatgaggctctgcaagtgcttggctactttaagaaaaaaatgacacacgtaaactcactgagcggcgccgaagtcaggcaggtgactctgggcttcaatgatttagtgcgcgtcctgaaacaggcagacgcctcagataccgaaaaaatccgggcagccgcccagttcaggttggtaatggatgcgatggaagaccactccgatccgctgtggggttcgcttgaaagaccgattatggcgacattcagcgccttaaaagaagatgtcagcggaaacggaagtggaaatttcaatgaaaagtggaatgaatttatatcattatatgatttaatttatcccagcctgacaatggatgtgtcggccggccagcttgatacggtggcgaaacatatcgaggtgattgagcaggaagggtttcagcagatgacaaaaggaacaaagcttgagcgtctgacactcctgcagcaggatttaaagcgggtttttgacaaggtggagcgggatgacgctgacccttcgctgctctgggtcattctgacaacaggcggtatcattattactgcgctgacatatgtcggctaccgaaaatacagagcggaaaaaaagaaagagaaaaagcgtgagtatcctaagtctaaataaacacaaattgctgtaaaggagctaagtcagtgaaaaaactcatccagcaattggcttcaaaacacctcccgcagccgatcagaggcagaaaaggggcgactgacgaaggaccgcgaaacctcgcgcgtgacttccagaatcctgacatgctcgttccgccttcaacggatgcaggaacggttcaaaacttgaaattctcattttctgatacgcatatgaggcttgaagacggcggatggtccagagaggtgacggtcagggaactgccggtatccaaaaacatcgcggcggtgaacatgaggctgaaaccgggagctgtgcgggagcttcattggcataaagaagccgaatggggatatgtgattaacggaggagtacgtttaactgcggtcgatcaaaatgggcggaattttattgataacgtaagtgaaggggacctgtggtattttccttccggcattcctcattccattcaaggattagagcagggaagtgagtttttgctcgtctttgatgacggctctttttcagaaaacagcaccttttcagtaacggactggtttgcccacaccccgcgcagcgtgctggaggcgaacttcggtgttccgggctatgagctggcttacattcacaagaaagagcgttatatgttccagttggaaccgccgcccccaattgagcgggcagcagtctcttccccggaaggccccgttttagagccgttcagctacaagctttcccggcaggagcctcttgttaccagcgggggaagagtaaagattgtcgattcaaaaacgtttaaggtgtcaaaaacgattgctgcagctcttgtggaggtcgaacccggaggcatgagagaattgcattggcacccgaatacggacgagtggcagtattacctttcaggagaagcgaaaatgacggtgtttgcggcggagggaagagcgcggacatttaactatcaagcgggtgacgtaggatatgttcctgttgcaatgggacattatgttcagaataccggtgacaccgtgcttcgctttctggaaatcttcaaaagcgaccgtttcgaagacgtctccttaaaccaatggctggcactgacgccgcagcgcttcgtcgagcagacgctcaatgtcagtccggcattcgcccgccgattgaaaaagaaaaaatcaccggttgtcaaatggaaacacgaacagtaaaggcggcaaaagccgcctttttattatcgtctgatcggatttttattttcatcaagcgtaaatccttcgccgagcacatcatggacgtcgcttactgcaacaaaggcgtgcgggtcaacggaagtgatgacgcttttcaaaagcacaatttcgtttttcggaacgacgcagtaaagaacgtccctgtcttcttttgtatatgatccctgtccttttaaaacggtgacgccgcgctccatctcttcaatgattttttgctggatcaaatcgtttttcgaagaaataatcgttgccccttttgcggcatagccgccttcctgtataaaatcaatcaatctcgcagcgacaaaaacggctacaagcgtgtacatcgcttccttgtaagaaagatacgtaaacaaagaaagcagaatgacacaggcgtcaaaggcaaacatcgtccggcccatcgggattccgaaaaatttgttgatcagccgagcgatgatatcgaccccgcccgtcgtgccgccgtatttaaaaataatgccgagacccgcgccgataaaaacaccggcgaacaaggcggccagcgctaaatcatgcgacagcggcatatgaatttcgtagcgctgaaaaacactcagaaaaacggaaagagagacggtgccgatcagggtatagacaaacatcgtccggccgagcatacgccagccgatgaaaaagataggaatgtttaataccaggttggaaatagaagggctgatgtggaataacgcatataaaagcagcgtaatgccggtaaatccgccttccgccaaattgttctgcatattaaagtgaaccagtccgaatgaaaaaacagcggcgccgattaaaataaagcaaatgtttttgattctgatttctccaagcattgcatcaaaccccttttccttccataagattgcgtaaatattatagtggatacaaaagaaaacagcaaactgccgtttttaacatttgtcaaatgtacttgaattagctaacatggaagagatgacaggaggtattcgcacagtgagtgacaaaacgatgaaagacttacaagctgaggtcgatgaatatatcggccaattcaaagaaggctatttcagcccgcttgccatgatggcccgtctcacggaagaactgggcgaacttgcaagggaagtcaaccattattatggggaaaagccgaagaaaacgacggaaaatgagaaaagcatggaagaggaaatgggcgatgtgctgttcgttctgatctgcctcgccaactcccttgatatttcattggaggaagctcataaccgcgtcatgcataaatttaatacacgtgataaagaccgctggactagaaaagaagaaggaaagtaggagaaaccatgtcaaatgaaaccattaaagtcgtcattgccggaccgagaggcagaatgggccaggaggccgtaaaacttgccgtccgcacgcctcattttgagcttgtcggcgccattgaccatacatacgatcagcaaacattacgggaagtgatgtcagctgattcagacgctcttatttatacggatatccgcgcatgtttccaagaaacaaaaccggatgtgctgatcgatttgacaacgcctgaaatcggcaaaaaacatacgaaagccgctcttgaacacggcgtccgccccgttgtgggaacgaccggattttctgaagcggatttagaggagcttcaagccttgactgaagaaaaaggaatcggcgccatcatcgctccgaattttgcattgggcgcggtgctgatgatgaagttctcacaaatggccgccaactattttgaagatgtagaaatcattgagcttcatcatgatcaaaagctggatgccccgagcggaacggcgctgaaaacagcggaaatgatttcaagcgtccgtacagaaaagcagcagggccatcctgatgaaaaagaaattctgccgggcgcccgcggtgctgaattaaacggcatccgccttcacagcgtgcgtctgccgggccttatcgcccaccaggaagtcatgttcggcatggacggccagacgctgaaactgcgccatgattcctataaccgggcttcctttatgtcaggagtgaagctgtcagtggagcaagtgatgaaaatcgaccagcttgtatacggactcgaaaatattatcgactgaatcggcaagggggagaacatcaaatgaaaattgctttgattgctcacgataaaaaaaagcaggatatggtccagtttacgaccgcatataaagatatattgagccatcatgagttatacgcgacgggtacgacaggcttaaaaatccaggaagcgaccggattgtccgttgaatgttttcaatccggcccgctcggcggagatcagcaaatcggcgcattgattgcggcaaacgccctggatctcgtcatttttctgcgcgatccgttaactgcgcagcctcacgaaccggatgtctccgcgctgatccggctgtgtgacgtatacgcgatcccgctcgccacaaatatgggaacagcggaaatccttgtccggacgctggacggcggggcatttgatttccgcaatcttgtgcgcggaggagagccgaatgtctgaacacgttgatattctggcgttcggcgcccatagtgatgatgtcgagatcggtatgggcggcacgatcgcaaaatttacggctcaaggaaaaaccgcggtgatatgcgatttgaccgaggccgaactatcatctaacggaacggtagggataagaaaagaagaagcggcagaggcggcacgaattctcggcgtaaaagagagaatccagcttacgcttcccgaccgcgggcttttgaaaagtgaggacggcatccgccggattgtcagtgtcatcagagcctgccggccgaaaaccgttttcatgccttatccgaaagaccgccatcctgaccacggcaatgcggcggctttggtcgaagaagcggtgttctcggcgggaattcataaatacagagatcatcaggaactgccggctcataaggctcagcgcgtatactattatatgatcaacgggtttcaccgtccggactttgtaatcgacataacggaaaccatcgatctgaaaaaagaaagcctgcacgcttatcaaagccagtttattcctacggcgcagtcagtgaacacaccgctgaccaacggttatatcgaaatggtggaagcgcgggaaagactgtatggcaaagaagccgggacggggtatgctgaaggcttcttttcaaaacagcttcccgttttgaatgatgatgtttttgggggcggacaatgagaccattaaaaatagggattacatgctacccgagtgtcggaggctcgggtattattgcgacggaactcggcaagctgcttgcggaaaaagggcaccaggttcatttcatcacatcaagcatcccgttcagattaaatacatatcatccgaatattcattttcatgaggtggaagtcaatcaatacgcggtatttaaacatccgccttatgaccttacactggcgagcaaaatcgccgaggtggccgcgagggaaaatcttgatatcattcacgcgcattatgcgctgccgcatgcggtatgcgcttatctagccaaacagatgctcaagcgtgacatcgggatcgtgacgacgcttcacggtacagacatcaccgttttaggatatgatccgtcattaaaagatttaatccgttttgccatcgaagcgtccgacagagtgacggcggtatcaaccgcgcttgccggagaaacatatgacttaatcaagccggataaaaaaattgagaccatctacaactttattgatgaacgtgtttatcttaagaaaaatacagagagtataaaagagaaacatggtattttgccggatgaaaaggtcgtcatccatgtttcgaacttcagaaaagtaaaacgtgttaaagatgtcatccgcgttttccgtaatatcgcagccaacacaaaggcgaagctcctgcttgtcggtgacgggccggaaaagtgcgtcgcttggcagcttgtcgaaaaatacggactgcaggatcaagtgctgctcctcggaaatcaggacagggtggaagagctgtattccatcagcgatcttaagcttcttctgtctgaaaaagaaagtttcggactcgtcctccttgaggcgatggcctgcggcgtgccgtgcatcggaacaaatatcggcggcatcccggaagtgattaaagatcaagtaagcggttttctggtggaagtcggcgatattcaggcggcatctgaaaaagcgcttgccgttttagaagataaacagctcagcaaacgattgactgatcatgcgctgaaaatggtggagacctccttttcttcgcaaagaatcgtcagtcagtatgaacggatttatgacgaattggcaggaccggagtgatcttatggaacaggaatttgtcaaagccctccccatccttcatcatctgatgaaggcgggccatcaggcgtactttgtcgggggagccgtcagagacagctatatgaaacgaaaaataggtgatgtggacatcgcaaccagcgcttcgccgaatgaggtggagcgcctctttaagcggactgtcgatgtaggaaaagagcacggcaccgtcatcgtcctgtgggaagatgaaacctatgaagtcaccacttttcgtgccgaatcagaatataaggactatcggcgcccggaagctgtgcggttcattacttctttatcagaagacttaaagcggagagacttaacgattaatgcgatggcgatgtctgccgaaggagagctgcttgattatttcggaggcgcacatgatatcggacaaaagctgatccgtacggtgggtaaccctgaagaccgttttcgggaagacgctctgcggatgatgagagccgtccgctttatgagtcagctcggctttctgttagaaaaagaaacaagagaggccgtcataaaagacagggagcttttggcacatgtatcagtagaacgaaagaccgtcgagtttgaaaagctgatgcagggcgctttctcacaagaagcgattcaaacgatggtgcagacaggtctgatacaagagctgcccggcctttccggttatgagcagcaaatgcttgaagcaagcggctttccgttttcttctttagatgcacgcgaagaacgctgggcagcgctgttattgtttctcggtctttgtccgaaaagtgccgaggcgtttttaaaacaatggaaactgccgggaaaggtcataaaaaaagcggtgcagatcataagcgtttatccggcgcagctggaagcagaagcgatgtaccgagcgggagaggcgctgttttcagccgttaaaatcgggatgctgaaacagcataagacgattgatgaacaaaagctgaaagaggttcagagcctgtatgagcagctgccgatcaaaagccttcgagacctcgacatttcaggcgctgatctgatggagctcagaaaccgccgcgcgggtaaatgggtggccgaagaacttcgccggattgaagaagcggtattggcagggaagcttcctaaccgaaaacatgacataaaggagtggctcgcatcatgggatcaacattaagaacccgattaattgatttattttctgaggcgggtgacggctttatctccgggcagaaaataagtgacgcgctcggctgctcgagaaccgccgtttggaaacatatagaggagctccgcaaagagggctatgaggttgaggcggtcagacgaaaagggtacaggctcattaaaaaaccggggaaactcagtgaatccgaaatccgtttcgggctgaaaacagaggttttgggcaaacagcttcattaccgggacgtcctgccgtccacccaaaaaaccgctcatgaacttgccaatgacggcgcgccggaagggaccctcgtagtcgccgataaacaaacggcaggcagaggaagaatggccagagtatggcattcacaggagggaaacgggatttggatgagcctcattctgagacccgacgttcctttgcaaaaaacgccgcagctcaccctgttatccgccgttgcggtcgtacaggccatcgaggcttttacaggcgtacaggccgccattaaatggccgaatgatttaatgattcacggcaaaaaagccgtcgggattttaactgagctgcaggcggaagaggaccgtgtccgttcggttattctcgggatcggcatcaacgtgaaccagcaggaaaccgattttcccggcgagcttcaggacattgcgacgagcctgagcatggaagccggtgaaaaaattgacagagcgggtctgatacaagagattctgctgacttttgaaaaacgctatcaggattacttgaaccacggctttacaccgatcaagctgctatgggaaagctatgcggtcggactggggaacgagctcagagcgagaacgctgcaaggaacgttttacgggaaatcgctcggcattgatgatgagggagttcttcttttggaaacgagagacggtataaagaagatctattctgccgatattgagctcaattaatcttagttggtacaagcctcgtgaatttggtatacttcctatgggcagtatcataatgaactgcacctgatcagcagaacagagattacgaaaagtctgccttgatccaaaaaaggactgggacagagggatgacattcgccgaacgttaaacaagtgggaatccttcttattttacagaaggcttttttgcttgcgaagaattggcggctcatctcctcaccgtttagaggaggagaaacagaatgaaaacaaaactggatttcatgaaaatgaaggaaaacggagagccgatcgtgatgctgaccgcttacgattatccgcaggcaaagcttgcggaacaggcgggagtcgacatgattttagtcggggattcgctcggaatggtcgtgctcggactcgattcaaccgtcggcgtaacggtcagggacatgattcaccatacaaaagcggtaaaacgcggtgcgaaaaatacgtttatcgtaactgacatgccgtttatgtcttaccacctttcaaaagaggatacattgaaaaacgccgcggccattattcaggaaagcggcgcggacgcgttaaagctggaaggcggagacggcgttttcgaatccatccgcgcgctgactctcggcggaattcccgtcgtcagccatttaggcctcacaccgcagtctgtcggcgtattaggcggatataaagtgcagggaaaagatgagcaaagcgcgaaaaagctcattgaagacagtatcaaatgcgagcaggcgggagcgatgatgctcgtgcttgaatgtgtgcctgctgaactgactgctaaaataatagaagaagtatccattcccgtcatcggaatcggagccggttcaaaagcggacggccaagtccttgtctatcatgacgtcgtcggccacggcgtggacagaacaccgaagttcgtgaagcaatacgccaaaatcgacggcacgattgagtcggccctcagcgattatgtccgtgatgtgaaagaacgggttttcccggaagaaaagcattcctttcagataaaccaaactgtgctgcaaggcttatacggaggaaagtaagcgatgaaacaactgacagaaactcaacagctgaaagaattaattgcacaataccgctcagaaggccggacgatcggattcgtcccgacaatgggttttcttcatgaaggacacctgaccctggttgaaaaagcaaacaaagaaaacgatattgtcgtgatgagcatctttgtcaatccgactcaattcggaccgggcgaggattacgaagcatatccgcgagatttaaagcgcgatgcccggcttgcagaacaggcgggagcagatgttttgtttacgccgtctccgagtgacatgtataagggcgagcaaaatgttgccgtgcaagtgaaaaggagaactgacgtgttgtgcggcgtctcccgcgtcggccattttgacggagtggccactgtgctgacgaagtttttcaatctcgttaaaccgacccgcgcctacttcggcctgaaagatgcccagcaggcagcggttgtggacggattgattgaggatttctttatggatatcgaattggttgcagtggacacggtcagagaagaagacggacttgccaaaagctctcgcaacgtctatctgactgagcaggaacgcaaagaagcgccgatgatctataaagcattgcagcaaggtgccgaactggtcagagacggtgaaagaaatccggaaaccgttataaaaaccgtcaccggtatcatcgaaaacacaagcggcgtcattgattatgccgaactgtacgcttatccggagctgactccgcttaaaacattaaacggcaaggtcattctggcctgcgccgtccaattttctaaagccagactgattgataatatcattattgatattgatgaatgggagagatcataatatgtaccgcactatgatggccggaaaactgcaccgcgctaccgtgacggaagccaatttaaactatgtcggcagcatcacgattgatgaagatcttttagatgccgtcggaatgctcgctaatgaaaaagttcagattgtgaataataacaacggagcgagacttgaaacgtatattattcccggtaagcggggagcggcgtcatctgtttaaacggagctgccgcccgtctcgtccaagaaggagataaagtcattattatttcttatcaaatgatgtctgatcaggaagcaaaaagccatcagccgaaggtggccgttctggatgatcagaataaaatcgagcagatgctgggccaggagccggcacacacgattttgtaaaagagccccttcatgggggttttcttttaagatttaggggcaaaagctgtttttccgctccatttctcaacaaaacgtgttacacttttctcgtatgcaagaattgaggtgtccattttaatgaacaaacaacggttcgttgtcatagatgtcgaaacaacaggaaattcgccgaaaaagggcgataaaatcattcaaatcgcagcggttgtcattgaaaatggacaaataactgagcggttttcaaaatatatcaatccgaatcaggccatcccgccgtttattgaacagctgaccggaatttcgtccggaatggttgaaaatgaactgccgtttgaagcggtcgcagaggagatttttcatctgcttgacggcgcgtattttgttgcccacaatattcatttcgacctcggatttgtccggcatgaactgagcgaagcgggctatgagctgccggattgtgaagtgcttgatacggttgagctttcgcgtattgttttcccggggtttgaaggatataagctcggtgagttgtgcgcagagctgaatattgttcatgaccgccctcaccgcgcagacagcgatgcggaggttacgggcctggtctttttagacattttacataaactgaaacatctgcctttaccgacgttaaagcagcttagaaggctttcacagcattttatcagcgatttgacgctgcttttggattcttttattcatgaaagcaggccggcggaagaaaagagctgcattccatacgcctctttttcaattaaagagcccgatcacattccggtttcccgtccggtgaatgcggccattgaccttgaaaagtggaacgaagaaaaagaacagatcttgtccggcatcatccccgctatgaaaagcggaaaggacagcttacgatgatggatgaagtgcttggcgccttccgcaatcgggagcatgcgctgattgaagcggcgcccggcatcggaaaaacgatcggttatctcgttccggctgttttatttgccaaagcggaacaaactcccgtcattatcagcacgtactctactcttttgcagcagcagatcatgtctaaagatcttccgcttttggagcgtatgtttccttggccggtcaaagctgctattttaaaagggaaatcacattatctgtgcctgccgaagtttgaacatattctgcatgaggaagatgacaactatgatgcggttttgacgaaagcgcagcttctcgtctggctgacggagactgaaacgggcgacgccgctgagctgaatcttccatcaggcggcagattgctgtgggagcgcatggcttacgatgagaattcttttatgaaaaaagggaaggactcggctgccgggttttatgaacgggctaaagaaaaagcgcaggccgcagatctgattatcacaaaccatgctttgctgttttcagatcaaagcagtgaaacgaaaaaactgcctgcaagcggaacggtcatcattgatgaagcgcatcatttcgaacgcgccgccagcgagcacctggggaagagagcttcatacatcggactgcacacaaagctcagccgaatcgggaccttaaaggaacacggactgttaaagcggatgagaaaactgttttatacgtatgaactgccggcggaaagtttttttgacgccgatgagtggatgaagcatattcaatcggaaagcgacgcatttttcagttcagtgcattcttttgtcaaacgaagaaaacctaaagacgatctgaaccgtctcgtctatagtctcaatcataaaagccaggataaagggtttcacatgataacggacggagcggagcggctttgtgcgatgcttgatcagctgcttgacatgttttccgtacaggagaaactgttacatcaaaagcttgatcagatgaaaagcggagcggcttttttagcgggcgaatatgtaaagtgtatcagggggctgaaagaatatcgcgatacgttcagcaggctgctgtttgaaaatgatgagaaagaagccgtttgggttgaaattgatgcgaagggcgcaaaaaatgccgtcagcatctatgcgcagcctttggagcccggtgaaatgctggcagaccagtttttcgcccgcaaaaaaagcgttgtgctcacatcagcgaccttaatggtggagcagtcttttcaatttatgattgaaaggctcggacttgcggatttttatccgcgcaccaaaagcatcccgtctcctttttcttacgatgatcagatgaacgtcatcattccgaaagagatgaaatccgttaaatatgacggggagcgggaagtcattgagcatattgccaagtatgcagaaatcatgtcaaagggaaaacagccgaagatccttgtcctgtttacgtctcatgatatgctgaaaaaagtgtatcaggaactgaaactcagtatggagatctcaggcattcagcttctcgcccaaggtatttcaggcgggagtcccggtaaattaatgaaaacctttaaaacggcaagccggtcgattttgctcggaacgaatcatttctgggaaggcgttgattttccgggggatgaattgtcaaccgtcatgatcgcaagacttcctttcagggcgcctgataatccgcttcacgccgcaaaatgcgaatttgccaagaagcaggggaaaaatccgtttcagacgatttccctgcctgaggccgtgttaacgttcagacaggggatcgggcgcctgctccgtacggcgggagacaagggaacgatcgttcttttagatcagcgtgtaaagacggcgggatacggacggctgtttcttgaagcgctcccgacttcatcccttttggagctgacggatgccgaactcggggcttatgtcagccaaacggaataaaagccgcataaacgcggctttcgtggtgtgggatgaggaattgtttttatagtaaaagcgggttcatgccgccttgtgattttattatgccgcgggcgcatcccgttatgactaacaaaatttgttcgaccgatggagggtataaaaatggaaagcaaaattgaaattctgtcaacgattaatgtggagcattcagatgatttatataaaatcgtcgatacattaaaccggactttgaaacgggacaacctgatgttcggccttgcgctcgacgaagaaaatcaaaatgaagcggtcttcaccatttatcgcacataggtgaaaaagatgagaaaaaaagcattaatatttacagccgtatttggtattatttttttagcagttcttttattttcggccagcatttttaaatctgcaatggctcaaaaagaagaaggccacgaaacagctgccgcagccgctaaagaaaaaacgaatctgacagacgctgagaaagtggagacctttgtcggcaaacagaaatattatgttgttaccggaacggataaacatggaaaagatatgtatgtatgggttccggccgacaaaaaagcaaaaattctctcaaaaaaagccagtgacggcatttcaagcggcaaggctgccaagatcgttcgggacgaagggcttgtttccaagctgaatggcgttcacccggcgagagaaaacaatgttccgttatgggaagtgacctatatcaacaaaagcgggcagtatagctttagctatgtggactttacaagcggcaagattctcaaaaacatcacaccgtgagacgtattaggggagttcaagttgaaattggcaaaaagagtatccgcattaacaccgtctgcaacacttgcaattaccgcaaaagcgaaagagctgaaagcggaaggccatgatgtcatcggcctcggagcaggagaaccggattttaatacgcctcagcacattatagatgccgcggtgcgttccatgaatgaaggctatacgaaatatacgccttcaggcggtctgccggccttgaaagacagtatcgcaaaaaaattcaaaaacgatcaggggattgaatataagccgtcagaaatcattgtctgcactggagcgaaacacgctctgtatacattatttcaggtcattctcgatgaagggacgaagtgattataccgactccttactgggtcagctatcctgagcaggtgaaactggcaggggggcgtcccgtctatgcagaagggctggaatccaatcagtttaaaatttcaccggagcagctgaagcaggctatcaccgagaaaacaaaagccctcattatcaattcaccgagcaacccgacaggtgttatgtatacgaaggaagagcttgcggaactcggaaaagtgtgtctggagcatggcattctgatcgtttctgacgagatttatgagaagcttacatacggaggaaaaaaacacgtctcaatcgcacagctttcagatgaattgaaagagcagacgattatcattaacggcgtttcgaaatctcacagcatgacgggctggaggatcggctatgcggcgggttcggagacgattattaaagcgatgacgagccttgcgagccacagcacatccaatccgacgtccatcgctcaatacggcgccattgcggcctataacgggccggctgagccgcttgaagagatgagacaggcatttgaggacagactgaataccatttacgctcagctcagtgagattcccggattcacctgtgtcaaacctgaaggggcgttttacttgttccctaacgccaaagcggccgcagaaaactgcggattcaaagatgtcgatgaatacgtcaaggcgcttctggaagaagaaaaagtcgccatcgtgccgggctcgggtttcggttcaccggacaacgtccgcttatcttacgcaacgtcactcgatcttttagaagaagcggtcaagagaatccgccgctttacggaaaaacacagctgattctgaaaaagcggcttttaaagccgcttttcacttgcattgaccccgttagagtagaacgggtataataaagtgatgaaaaaagagattcaggcagattcctgaatgtctttcttgttctggagggaaagagtttgaaaacaacaatcaaccaagtgtataaacacacaggcgaggaagtaacgattggagcttgggtcgctaataaacgctcaagcggtaaaatcgcatttttacagctgagagacggtaccggcttcattcagggagttgtcgtcaaagctgaagtagaagaagacatcttccaaattgcgaaatcagtgacgcaggaaacgtcactttatgtaaaaggaattgtgaaagaggacgagcgttcaccgcttggctatgagcttgctgttacatccattgaagtcattcacgaagcgactgattatccgattacgcctaaagagcacggtacggaattcttaatggatcacagacatttatggctccgttcgaaacgccagcacgcgattatgaaaatccgtaacgaaatcatccgtgcgacttatgaatttttcaacaaagaaggcttcgtgaaagttgatccgccgattttgacgggaagcgctcccgaaggcacgactgagctgttcgcgacgaaatattttgatgaagacgccttcttgtctcaaagcggccagctgtatatggaagcagctgcaatggcgctcggaaaagtattctctttcggaccgacgttcagagcggaaaaatcgaaaacgaaacgccatctcatcgaattctggatgattgagcctgaaatggcatttgttgaatttgaagaaaaccttgaagttcaggagaattatgttgcatacatcgtacaaagtgtgctggaacattgtaagatcgagctgaacacattaggaagagacacatcgaagcttgaacaaatcaaagcgccattcccgcgcattacgtacgataaagcgattgaattcctgaaagaaaaaggctttgacgatattgagtggggagatgacttcggtgcgccgcatgaaacagcgatcgcagaaagctatgacaaaccggtgtttatcactcattacccgacgtcattaaaaccgttctatatgcagcctgccaaagatcgtgacgatgtcgtgttatgtgccgacttaatcgctccggaaggctacggggaaatcatcggcggttcagaacgcgttcatgatatggatttattggaagaaagattaaaagaacacggtctggattcagatgcttacaaatggtatgctgaactcagacaatacggttctgttccgcactccggcttcggtctcggacttgagcggacagtggcttggatcagcggagcgcctcacgtgcgtgaaacgattccgttcccgagacttctgaaccgtctgtatccgtaatagttatgaaaaacgaagtctcctgcaagggagactttttctaagtaaaggggaaagctcccggagataaccttttacagtaagaggtgtaaggatgaaaaaacagcaatttatagatatgcaggaactcggcatttcaagcattcccaacctgctgctgacacattaccggcagctcgggctgaatgaaaccgaattgatcctgcttttgaagattaaaatgcatttggaaaagggctcttattttccgacgccgtttgaacttcaatcaggcatgtccatctctgctgaagagtgtacaagctgcctgagaatgtttattcaaaaaggttttctgtttattgaagaatgtgaagaccataacggcataaagtttgaaaaatattctctgcagccgttatgggcgaagctgtatgattacatgcagcattctcaaaatgaaacgcaggaaagaacgtcagaaagagaacaaaaaagcctgtataccatctttgaagaagagttcggaagaccgctgtcgccgcttgaatgcgagacgctggccatatggcaggatcaggatcagcatgatgcgattctgattaaacacgccttaaaagaagccgttttatcggggaaactcagttttcgctatattgaccggattttatttgaatggaaaaagaatggcttcaaaacggttgagcaggcgaaggcgcacagccaaaaattccggcgtgttcaaacgaaacagaatgatccgcaaaaagagtatacgaggcaggtacctttttacaattggctggaacaataacatgagaaggggagaaacgtgttaaatttaaagcagattgaatattgtcttgaaaaaatcggcgatatgtttccgcacgcagaatgtgaacttgtccattcaaatcctttcgaattggttgtggcagtcgcattatccgcgcaatgtacggacgctctcgtcaacagagtgacaaaaacgctatttcaaaaatataaacggcctgaagattatcttgccgtatcgctggaagaactccagcaggatattaaatcaatcggtctgtaccgtaataaagccaaaaatattcaaaagctgagcaaaatgatcattgaagagtacggcggagaagtgccgaaagaccgggatgagcttgtgaagctgccgggtgtcggacggaaaacggcaaatgtggtcgtgtctgttgctttcggcgtacctgcgatcgcagtagacactcatgtggagcgggtctctaaacggctcggcatctgccgctggaaggactctgttttggaagtagagaaaacattaatgaaaaaagtgccgaaagaggattggtctgttacgcatcacagattaatatttttcggccggtatcactgtaaagcgcaatctccccgctgtgcggaatgtcctttgcttccgctatgcagagaagggcagaagcgtgacaaaaaagggctggtgaaacggtgacggcgattgacattctggcaggctatgaaacatacctgcgcagccttacggacttggaaagcctcgagatcaaagcggcgctgcgccgccatccgctgtatatggatttcagcggccagccaacagtgcagccatggagggaaaggggcgaatatgtcccgtttctttttcagatttggaatgaaacgaaagaaacgctgcttcccgtttttcaaacaagaaaatcgaggtgtgatcaaaatgacatgctgaagggaatagcctgtctgattgccgcttttcattggacggcaggggagcgggtcacatcactcgactggactgtgcttgaaacaaagcattttcccgcggaaccgatcaattgggcggagcgaatggcgtttattttaacaaaaccgactcaatatcactcgtttattcagctggatgaattgatgacggagatgaagaaacaatatcataaatatgaagccatgaacaaatgttaaaaacctccttttcccataaggaggttttttgtacgaaaaaaatccttcacctgtttggggtgaaggatttcgtccgctaatgagcgggatttgactggatggttgacgaattggactgcccgttgatagttgaagatgagtcttggtttttatccgtttgaccgctgtcaggtttatttgagccgtctgaaccggaatcggaatcattatcagagccgttatcttgctgtccgttgttatcggtcccgttgccgggctgattctgattgttgttatctgtttgatccttatcggattgatcctgatttttatccgggtcatcagttggtgtttgatccgatccgtcagacgtatctgtctgatcgtcatctttgtttgaatcatcggtttgcgtcttgtccttatctttatcttcatcagtcttctgttcatcgtcagtcgctttatctttatccgcatcgtcttcttcatctttcgggactttgaaagatgctgatgccgtatcgctttttccgtcatcgttttccgctgtcacctggaagctgtatgtggagcctggcgtgacatttgagacgacggcttcttttgccgaactgttttgaatgtcactgtagcttccgccgtcaacggattgtttgacattgaatgttgcatcaccgtcataatcccagcttaaggttaatgattttttatctttgtcgtatttcacttgcaatcctgtcggtttatcggctttttctttcgtgtacgttttagaaacggcagttggctgcgttcctttcacgaagtactccgtcacttttttatcatccggcgtattcggtccggctaaagcggcaggattcgagcctttctcaactgtttcttttacaacgctgtcaggctgcttgaagcttcctttaccgtcatcaacgtatgagatcagcttttggaaaatccgttttgcgacttgctggtctgcagaagacagtgatttcttgcctgctttgttgccagactcaactccggtccaaaccgccgctgtatattgaggggtgtatccgacaaaccatgagtctgggactccgcctggagcaatgttatatttttgaatgtcctctttagtaaagttggtcgtacccgttttaccggcgacttccacgttcgccacctgagccagtttacctgttcctgattcgacagctgatttgagcatatctgtaatcataaacgctgtgtagtcgctcatagcacttttcggtttcggtgttaaatcaagcttagtgccgtcattaaattcaatcgatgtgaccgcgtgcggttcgttgtacgttccgttatttccgaacgcactgtaggcgcctgccatggtcatagtagatacaccgcggttaccctcaccaaatccccgatagagtagggttcatatacttgatctttgtttaatcccaatcctaagtcgtttgcgaagtcgacggcatgatcttttcctgctgcttggtatgcttttaaagcaggaatattacgtgagtctgcgagggcctctcgcattgatatctggcctctgtatttattgtcccaatcatgaatcggtgtgccgtcagagtacgtataagctgagtcgtcaatctgttcatacgtcgaccattttttattttcaatgaccggtccgtaatcaagaatcggttttatcgtcgaaccgggctgggttttaccttgtgttgcataattgaatcccccggtagttctgttccgtcctgccccgatggcgcggatttctccgtttgtcgtatcaaggagcgtgacgccgccctgcatgccttcggtaaatccggctgtatcgccgttcatcaattgatcaagataatcttgtgctttcgtatcaagagtcgtgtaaattttcagtccgtcagttgaaatatcgacgtctttcttttcttttgtctcaatttctttcataacttcttcgacaaaagcgctgtatttatttgtgtcctttttatcgtattccttttggctgacgacgccttcatctttcatggacactttcttcgctttttggtattcagagtttgaaatgaatccttgtttttccattaagctgagaacgatgtttcgtcgtttttcggaagccttcgggtttttaaccgggttatatccggtcgggctttgcggcattccggcaagcgttgccgcctgttcaaccgtaagcttgctcaagtcttttacgccgaagaattcttcagccgcttttccgacgccgtaggcgcgcggtgagaaataaattctgtttaaatacatttctaagatttcatctttagaataatggcgctccagctgcagggaaagccacacttcctgtgctttccgtttaatcgttttctgatgggtcaaaagcgagtttttcacaacctgctgggtgattgtgcttcctccctctgaaccgaacccatccgtaaagttggcgaccaaagcgcctccgatacgaatcgggtctataccgtggtgcttataaaaacgggcgtcttcagttgcgataaatgcttctttcacaacatcgggtatatccttaatcgggacgtaggttcgtttttcaccgcccacttccgcgatttcttttccgtttttatcgtaaatcgttgaagagtaaggcgttttcagcttggcttcgtccaaagacggcgcgccggaaaccaaaacggcaaatgccgccgctccgccgactatgccaaggacaaacagaataaccaaggacagcacaatctttttgaataaaccgcctttacgctgtttcttgccttttttcggtgaagagggcttagtgcttttcgtctgccttgccttacggcgttcttcacggctcgtaaattgatctgacataacatctcaacctttcgtttatcaacctttcgctcagtctactgttcctgcgaaaaataaagctgttcaataatactaatataatcaattctcggtgagtatccaagggaaatcggaaaggaagcatcttctaattcgtctttgcgaattgattttctgccgttcttctcctttctctcccaaaagacaaacagcttgtcggcttcgaggaaataaacctttccgaaagcggatataataacaaaacaaatgccgtcttgcctgaccacctgcttcatatgctcaatctgatgatcatgaaaattctgcaggggaaatgccgttttgttttttgtttcttttgcctcgaaatcgatgtagcgtcctttataaatgccgttgtagtcagttgttgaagactgtttaaaataagcttccttaatgactgcggcgcttcttttcggatagtggacgtttacaatctggacgggtgtcggctttttgtgaatgacagcaatttggttagccagataatacttattcgtttcattcaggtcgtcttcgagggtcatgccgcgattactgtatgaatgagaccgtttctggctgttttgggatgaaaccgttttgttcggctgaaaagtttttccattcgggtaccgaatcactttttccatcctccttatcaaactaatagtgacggaagtgaatgaacgtgcataaacgacagaccgtaaccgccattcttcgcctgatcgaaaaagagacgaaaataaaaaatgccgataatatttcccggacgaatgcctataaagcatattatgaccgccatcctgagatcaagtggccgcttttggcatcctttgtgtcccgcaatgcgggctggtcgatgactgatttaagaggcgtcctttatcaggagggccttgacagcagtcagaaaaactggtttttcctttcgtatgaaagggcgaattggctgattttttctgatgcctatcctcagcttctggtctaccagtggtcaaaacaaatcggcgaacctcttttccgtcatcttccttatttccgcgtctcggcttttatgcaggaagaatggttccgcttttggcgtgacggagatacggaacggctcatgtatgctcttattataaatgaacaaaacactatccaagcacctattatacaaaatccttcgtttaaaaagaatgtttttggcacgattcctttttatttaagtgattggtttcactttaatacggtgatattcccttcatttgacggacatttatacggaatttccgtcaaacggttttcaaaaaccgaagagagaattacgctcggaaaacagctggcccgccttctgttcagccctgatcttcacgcttctttttaccgttttcttgataccgttcctcataccggttcacgctttgatatggagaaaatgatcggcatcaaaaaaagaacatcaccgatgcttaggacaacctatcccattgttgcccacccattagacggcgaaagggcggattggtttcaaaaaaggttaagaaaaggggctttcttacaggagaaaatgccgaaacagcttgaactgacggactggtacttccagaaaagacgggagctccatgcgctcttcgcggttaaagagtggctgaagaaatgaaaaagcccgaaaccgttcgctggggtttcgggctgctgatgtgttacgtggaagggcggtttgggccgcctaattttttatcaagcgtatcagtcgtttttgcttcggttttttgctgtttacctgcatttttcggtctcgttttcatacggcacctcctcaactgtatcgtttgcattaacgtgccggttcatacaaagtttgcggcacttttttgtcgaaaggcacgccttttaggataatctctgtttgtttgccgaactgcttctagttttgtcatgtgcagaggagagcggtatgaaaacgagaattatatttgaaagagatgcaagtgataaaagggaggaacatgaatgtctgtttacacgagcaaggctgatattctccgtctgctttctgatatcgaaatccggatttctgctgctgaaaaaacgcttacccaagcagtcagatgctgtcaggcggaagctgaagaaatcagacaggagaaactttcccgtcttgaggaagaggcgcgggagcttcatgtttgtattgatgacctgtttttgactgaccggcgtaaaaaggatttgccgcgagtctgccggataagctgattttgtgcaaaaactttggtaccatatgtactgaggtgagtccgtttgcagacacagtcgttattggagctgacagaacaaatgatagaggcggttctggaagccgaaaaaaggtatcaggatggaaaagagtcaggccgttcatatgatttttttgagacgattaaacccgatgttgaaaaaagagaccggctttgcgcgctttggacagaagcagcgcttgcgtttattcaggaaaaccgtccgaaatacgttcatcatgcacaaattcaggccgttacagaaaatttcggggagctgatgctccaatcatatgttcatcatattcataaaaaaagatacagggatttaactgaatctgttttatatacgcttcgtatattaagggatgaaattgaaaaagaaggcagctgaaaacggctgccttcttttatataaaggggtcgggtatgttattcatacgccgggttttctgctccacttgcttcgagaaccttcatactgtttcgaaattcggttgcggtgagatggccttgaatatagaggaattttgcaaagtccatcagtttatctgcacaatctgtttcatattttttcacttcagcaaaacgctttcttaagtatgatacgttcataatggtgcatcccctctcatgtatgttgagattatgttaacataacgattcgacttttttctgtttttaaaaaattaagactttcgacagcatttgacaaagagcagaatcaccgaaagcacataaccaaggcggaattcatacatatatagcagaaacttagtgagagacaagggggaatgtcatatgcaatggagagcgcagccatatcaaaatatgtaccagcagccggcgggatatttctacccgcagcagatacagccattacagccgccgtatccgcagcagatacagccattgcaacagccgccatatcatcagcaagggcagtacccgcagcaattttatccgaatcaggaatacggtcatatacagcagccgtttgctcctgctcctcctcaggcaggcatgcccgggggccagccggggtttgtgaatccttaccccgttcccagaccgaatcagcagcagtcttcccaattctcaggcatactctcccagtttaaaaaaacgaacggacagtttgactttaataaaatgatggatacaacggggcagatggtaagcgccgtaaatcaggtcggatcgctggtgaaaggcttcaccagtatcttcaaataaaaagcatgaatgatatccatcattcatgcttattttttagggaaaaagaaggtaagcgtctgttcattccaggatgtttccatatcttcttcacttaccttatacgggaggacaacggttcttgtcatgcttgaagacacatgggatgattgagcctgtttatgatcgtagcggattgtaacgtgaaggtagcaccctttcgtttccaccagcatatccccgtcacggaacgtctcgggaacgccgatatcaaccgcgagccccgtcggctcttctctgacgtcaatcgtcacttgcgcttcagtaaaagccgaattgacaaggtgctgaaaaccctgcatcaattctgcgaagggacctgagtgaaaaaattggtccatcgcatggctgatgatgtcctcattactttgcggatcaagtttatcgttttgggattgatccatatgaccaccgcctttttacaaacagactatgcgatgctatgccgtatggttaagaattgaaggaaaaaagaaagtatggttaaatagtggagaataaactggtaacggattcacatttaggaaggggagcacaacacattgctgaaaaaattattcggattgggagacagccggaaaaagccggccgaggaagtgattttttctccggctgacggagcggtgatggatttggcttcagtgccggatcctgtattttcacaaaaaatgatgggggacgggatcgccgtcgagcctgcaaacggagaaattgtttcaccggttgagggagaagtgattcagctgttccatacaaaacacgctgtcggcatccgcaccctttccggagcggaacttttgatacatgtcggtttggataccgtcaatatgaacggcgaaggctttgaagcgcatgtaaaagaaggagacaaagtgaaaacaggcgatctgcttttaacgtgccggctggatttaataaaagaaaaagcaagcagcaccgtcatccctatggtgattatgaatggcgatgccgcagaacctttgcaatttgcaggcgcaaatgaagcgaaaaaaggacaaacagagctttttacgataaaaatgaagtaggcaggggctgattccctgctttttttcttgtgcaggattttcatctagccaggcaaacaaatattcggtaaactgtacctcataaagaggtgtgaacgatgaagaaaaaatcactgagcgaactgattcaggaattaaaaaatcatgaaaatattgtgcattggcatgaagaggaaccgcgggaggcgaaaacgatgccgatgccggagcaagtagatccgaacattcgggcggctctcgaaaagagggggatcgagcggctttttacacatcaatactccgcttttcagacggttcaaaacggagaaagcattgtggccgtcacaccgacggcctccggaaaaacactgtgctataatcttccggttcttcagtctatcgcggaagatgccacaagccgcgcactttatttatttccgacaaaggcgctcgcgcaggatcaaaaaagcgagctgaatgaaatcatagacgagacgggcatggatattaaaagcttcacctatgacggagatacgtctccggctatcaggcagaaagtcagaaaggccgggcatattgtgatcacaaatcccgatatgcttcattcagccattcttccccatcatacaaaatgggtgagtctgtttgaaaacctgaaatatatcgtcattgatgaattacatacgtaccgcggtgtattcggcagccatgtggcgaacgtcatccgccgtttaatgagaatctgcgctttttacggaagcaagccgtcatttatctgtacatccgccacaatcgccaatccgagggagttggcggagcagctgacgggaaaatctgtgcgcctgattgacgacaacggtgccccggcaggaagaaagcactttgctttttacaatcctccgattgtaaataaaccgctgcatattcgaaaaagcgccaccgtggaagtgaacgaacttgccaaaacttttttaaaaaataagatccagacgattgtttttgccagaagccgtgtccgggtcgaaattattttaagccacattcaggagatcgtaaaaaaagaaatcggcgcgaagtctgtcagaggctatcgcggcggatatctaccgaaagaaagaagagaaatagagcgggggttaagagacggcagcattctcggcgttgtcagcacaaacgcactggagctcggcgttgatatcggccagcttcaggtctgcgtgatgacggggtacccgggcagtgtcgcgagcgcatggcagcaggcgggccgggccggacggcggcagggagaggcgcttatcgtgatggtggcgaactctgatccgattgaccaatatattgtgcgccatcctgattatttctttaaacgctcgcctgaatctgcaaggattaatcccgataatctcattatattggtcgaccacctgaaatgcgccgcatatgagctgcctttcagagccgatgaaacattcggagaaaatgatgcgagggacattctcgagtatttagaggaagaaggggtgcttcacgaaaaccgcgaacgctatcactgggcgagcgaatcttttcccgcctccaatatcagtctccgttcggcgtcacaggaaaacgtggtcatcgttgaccggtcagagacggctgatgtaaaaatcatcggagaaatggaccgcttcagcgcgatgacgcttcttcatgatgaagcgatttatcttcatgaaggggtgcagtatcaggttgaaaagcttgattgggaacataaaaaagcgtacgtgcgaaaggtcgatgtcgaatattatacagatgccaatttagcggtgcagctgaaagtgctggacattgacagaacggacagcagaaagaaaacggccttacatttcggcgacgtcaccgtgaacgcacttccgacaatatttaaaaaaattaaaatgacgacatttgaaaatataggatcaggaccgattcatcttcctgaagaagaactgcataccagtgcagtctggcttgaattaaaagaaacggattcggaaatcggcgaaaaaacgcttgaacagctgcttttaggcattgcccacgtcctgcagcatatcgtgcctgtatacgtcatgtgcgatcgaaatgacgtgcatgtcgtgccgcaaatcaaagccgcacatacgggacttccgacaatctttctgtatgatcattatccgggcggaatcggacttgccgatgaagtatataaacgatttgatgaaatcaatgaaggggctgagcgcctgatccgacaatgtccatgtcaagacgggtgtccttcctgcatcggctccgaaatagaaggaatagatgcaaagaaagcgatactccggctcttgaattacgtgtaaaagaaaagggggacgaaagatgtccttgaaaaataaattaaagcggatgaaaaaccacctgaatgtgccggaagctgaaaaaaagccggcagcttcacaactttcggtcccggatattcaagtcccgtttagagaagaatgggaggcattcggagtgaagcctttcttttttgaggatgaatactgtcttatccgcgaaaccgtctatccgctttcgcaccgccacggacggtacagcttcagtgaacttgatgacgtcatggcattatggaataaaggcggtttgacacatactttatcagcagaaggatacgaaaaaagccagctgttcttctttgatactgaaacgaccggcctcggcggcggggcaggcaatatgatctttttgctcggccatgcaagagtgtatgaagaccgtgtcgcggttaaacagcatctgctccctaaaccgggaaacgagacagctctttacaaaagctttttaagtgaggttgacattacgtcccttgttacgtataacggaaaagcctttgactggccgcaggtaaaaaccaggcatacattgctgcgggacaggcttccgaaacttcctgacttcgggcactttgatcttctgcacggggcgagacggctttggaaacataaattagagcgtgtatcgctttcggcggttgaaaatgaagagcttgcttttaaaagggacgaagacacccctggttatttggcgccgatgctgtattttcaatttttaaaggcggaggacccggctcttttaaagggagtgctctcgcataatgaacaagatgtgctttccctcatcgctctttacatccatatgtcaaaaaagatttttgcatcttctgatcagacgtcagaacgtcaggaagcatacgccatggcgaaatggtttatcgctcataaagaaaccgatcgcgccgttttgcagctggaagcgctgcaaggcaaagactttgaagattcggatcgggccctttttgacttagcgatgctttataaaaaacaaaaccgcaggcaagacgccgtgcccctttgggagaaactgacggactctgatcttcacacatgcagacaccaatcagcggttgagctggcgatctattttgagcaccatgcaaaagattacaaaaaagctctgcaggccgcgcagcaggcggcagaagacggggaaatatcggaaaaagaagccgagaagctccatgtgagaattgcccggctcaagaggaaatattcctcttgaaatattgcccgggaaagcgcaaaagccgagctgtttcgccaaaaatatttttttctgaatccgcatcgattttgttgtagaatggtgccgcatcttgtaaaatagcgttagttatttataggggagagttggtatgtataaaggtgttttttacttgttctttgtcgtggtttttttgattgcgtttgtattttcgaattttaaagacagtttgctgacacacttttaaattgggtgattgaattagaacatgcaccctcttttcttcataacctaacagtgtaataaaagttaatggagaggggatttagcatgtttcatcatcattgttgcagaccaaacgtgatgccgccgattgtccatccgactcattgctgtgaacaccattgcttttctaacacggttgtgccgcatattcatccgcaacatacaactaacgtaaatcaccacaactttgagcacgttcattactatccgcacactttttcaaatgttgacccgacaactcaccagcattttcagtgcggaagcccttgctgcgatcattagtattgaacgcttaagcaagatcggttaggatatcagcaaatcaaaatggggcccgatggggagccccattttttaagcaggtgattaattgaaagtattagccgtaacggggtacaagccgtttgagctcggtatctttaaacaggatgaccgggcgcttgtttatataaaaaaggcgatagaaaccagactcagaagctttattgacgaaggcttggaatggattctcatatccggacagctggggactgagctttgggcggcagaaacggcgtacgatctcagagaagagtatccggaattaaaggttgccgttatcacgcctttctacggccaggaggaaaagtggaaggagccgaataaagaaatgtatgaagcggtgcttgctcaggcagattatgaggagagcctgacgcatcggccgtacgaaagtccgctccaattccggcagaaaaacgcgttctttattgaaaagtcagatgcgcttttgcttttatatgatccggaggtggaaggatcgccgaaatatatgctgcagcaggcagaaaaacgccgtgaaacagacggatatccgatttattcgattacgatggatgatctccgtgccgccgttgaggaagaagatttctttacataacacgtcagagaatatttgacaacgggacgtgtttctgaataaaatataacatgatgattcacgatatgaggtgaaaaagatgcttgctgataaagtaaagctttctgcgaaagacattttggaaaaagaatttaaaacaggcgttagaggttacagacaagaagacgttgacaaatttttagatatgattattaaggattatgaaacctttcatcaagaaattgaagaactgcagcaggaaaatctgcagctgaaaaaacagcttgaagaagctagcaaaaaacagccggtgcagtccaatacgaccaactttgatattctgaaaaggctgtccaaccttgagaaacatgtattcggcagcaaactttatgacgaataaggcagatgcacttgtcaaatgagacaagttgctttataatgaacaagtgttcttaacgttcgggtaatcgctgcaggtctttgaatctgtagaggaaagtccatgctcgcacggtgctgagatgcccgtagtgttcgtgcctagcgaagaaataagctagggcagccttgataggctgacggcaggaaaaaagcctacgtctccggatatggctgagtatccttgaaagtgccacagtgacgaagtctcatcagaaatgttgagagtggaacgcggtaaacccctcgagcgagaaacccaaattttggtaggggaaccttcttgaaggaactgaacagatagaaggacagaatactttctgtagatagatgattgccgcctgagtacgaggtgatgagccgattgcagtacgacggaacaaaacatggcttacagaacgttaaacattattgatatgacaaattagagctctcctttaaaggggagcttttatcttgaatgaaacgaaagcttaaaagagacagggtgatacgatgaagaagtacacactaatagcgacggcgccgatgggaattgaagcgatcgtcgccaaagaagtgcgtgatttaggttatgaatgcaaagtagacaacggaaaagtcatttttgaaggagatgcgcttgcgatctgccgcgctaacttatggctgcggacggctgaccgcatcaaagtacaggtcgccgagtttcaggcaaaaacgtttgatgagctgtttgaaaaaacaaaagcgattgactggcgcgcgtacattccagaaaacgcaaagttccccgttatcggaaagtccgtgaaatcagtgcttgccagtgtgcctgactgccagcggatcgtcaaaaaggcgatagcgggaaagctgaaacttcaatcaggaaaacaaaatgaatggattgaagaaacgggacccgagtataaggtggagatttcccttttaaaagataaagccgtacttacactggattcatcaggaacaggccttcacaaacggggatacagggttgatcagggcggagctccgattaaagagacgctcgctgccgcgttaattctgttaaccaactggacgcctgaccgtccgttcgtcgatccgttctgcggttccggcacgatcgccatcgaagccgctttaatcgggcaaaacattgctccgggttttaaccgtgattttgcttcagaagactgggaatggatcggaaaagaactgtgggacaaggcgcgccttgaagtggaagaaaaggcgaactatgatcagccgctgcagatttttgccagtgacgtggatcaccggatggtaaacatcgccaaagaaaacgcagaagaagcgggacttggggacctgatcgaatgcaagcagatgcgagtgcaggattttacgacgaaactcgaattcggcgttatcgtcggaaaccctccgtacggcgaacggctcggcgaaaaaaagcaagtcgagcagatgtataaagaaatgggccgggcatttgaatctcttgatacatggtctgtctacatgttaacgtcaaatgaacaatttgaagaggtctacggaagaaaagcaacaaaaaaacggaagctctttaacggttttatcaaaacggattattatcagtactgggctaaagtgcggccgcagcggaaaaagccgcaacaaagagaagacgcctgatacagcgtcttctccggcatctttacgttttattctgccattaccagcggtgcgcttttgcgttgctccgtaaaataatgttggtctgggacatttcggtgtggccgttcacctgcgatttagagcgtttcggccgcgtccaattgtgatgaaacaattcagaatgctgatctaatcgatctttataactcatgtaaccatcactcccggatagaataattttgtgaagatggatattcgatcgaatatctgttgtagtttgtgcaggtcaggtgcggatcattcaggatggcatgtatagaaagtgaagcatcggcatagaatgatgattatttctatttgagaggtgatcttattttatgctgaacagcgagcacttcagtaaaatacaaaaggcgttagacgcaactgctttccggctggaggaagccggagctaagttcggtccttccgtcatgacacacgcacaggaagaacttgaaaatgcggtaaaacatacacattcaacagaccatccgttcctatgtacacatatcattaaccggaaatgataatgacaaaaacttggcgaggccaagtttttttgttgtattgaaaagggttaaatgatattatagatggtctgaatgccgaatagttaggggttggagttgggtgacaacatcacgtttgccttttgctttaacaaaagaaaagaatttttacgaagaattgaacaattggattggtgacgtgttttacgatatccttcccgagaaaggctttgaccttcgggatgagcaggtatttatggcgtttcagcttgaacgggcatttaaagagaaaaaggtcatgttcgctgaggcaggagtcggtacggggaaaacgctggtgtatctgctgtttgccatcagctatgcaagatatacgggtaaaccggccattatcgcatgcgccgatgaaacgttaattgaacagcttgtcaaaaaagaaggcgacatttccaagctgacagaacatttggatctgcagattgatacacggctgtccaaatcccatgagcagtatctctgtctgaaaaagctggagaaaacgatgcagcgttctgatgatgaaaagtggctggatctttatgagtcgctgccttcattcgtacacgaatcacaagcgatgcagcgcttttatccgtacggcgaccgcaaacagtacgctgatttgacaaatgaagagtgggcaggcgtcagctatgattccttccaagattgtttaacatgtgatatgagacatagatgcggtttaacactttcaagagatcattacagaaaatcaacggatctgattgtttgctcccatgatttctacatggagcatgtatggacggaagaatcacgcaaaagggaagggcagctgccgcttttgccggatcacagcgccgtcgtgtttgatgaaggacatctgctggaattcgccgcgcaaaaagcgttaacgtatcgtgtgaagcagtcgacgcttgagctgtttttagagcgtctgcttcaaaatgacatcagagaggaattcgccgaactgattgaagatgcccttgccgcaaacgatgagtttttctatgtgctgtcagaggaatcgaaggaaatcgccggctctcaccgattggacatccaaaacgaccagcgtgttaagcgtgcggctgacgaactgtgccgtctgctcgataaaatcggcgaggcgctcgtatttgaatcggaaatgtatacgattgataagtacgagctgtcagttgtagaagaatacgtcgaacaaatggcatattcgctgtcgctgtatcaaaaggatgccatcagctggcttgaaacgcgggatacagactcaacgtttgtcgttatgccgagaactgtagccgaagttttgggagaaaaggtcttttctaaaaagataccttatatcttctcatcggccactctttctgagggcggttcatttgattatatcgctgacagtctcggaatccgtgatcctttatcatttaccgttgaatctccgtacgattacgaggagcaaatgtctgttgcgcttcacggtgacatgacgtctgagcagaaaacagtcgaaacgattgaaaccattaaggagaatgaaggacgcaccctcgttcttttcccttcctttgaagacatgaaggaatttaaagaacaggctgccgcgtgggagctgccgtatccgatttactacgaaggtgacgaagagatcagcagtctggtcgaaaaattccagcgggatgaagaatccgtgctttgttccgtccacttatgggaaggtcttgacattcccggtgactcgctccggaatgtgaccatttgggcattgccgtatccgcctcatgatcctgtgtttaccgcaaagcggaacggagcgaaaaaagatccgtttgaggaagttgatctgccgtacatgcttttgagagtccggcagggaatcggccgcctcatccgttctaatcaggacagcggaaccatatccatttatgcgggcggagaaagtgaacgggtcctggccgaagtcaaaaaggtcttgcctgttacaccgaaaatcgtataaaaacaagagctgcaggaatcttatcctgcggctttttttaatccgggaagttgactttataacggcgttccattagcctgtaattgatagtgaaaagggaggggaacggatatggatgtacatacatatgaaaaagagttttttaatctgttaaaaagagtatcccactatgaagaagctattgcgctcatgcattgggacttaagaacgggagccccgaaaaaaggctctgatgaccgggcggaaagcatcggacagctgtcggctgacgtttttcaaatccagacatccgaccggatgaaagagctgatcgacatccttctcgtgcatgcagaagagctctctgaagatacagtgaaagcggcggaacttgcgaaaaaagattatgatcataataaaaaaattcctgaagatgagtataaagaatatgtcattttaacatcgaaagcggaaacggcttgggaggatgcaaaggcggcctctgatttctctatgtttgctccgtaccttgagaagctgattgattttaataagcggtttatttcttactggggctatgaagatcatccatacaacgcattgctcgatattttcgaaccgggtgttacggtaaaggtgctggatcagctgttttctgaattgaaggaagcgatcattccgcttatcaaaaaagtgacggaatccggcaataaaccggacacttcctttataacgaaaacgtttccgaaagaacaacaaagagacctctccttgtatttcttaaaagagttcgggtatgattttgacggcggccgcctggacgagacggtgcatccgtttgcgacgacaatcaaccgcggcgatgtgcgggtgacgaccagatatgacgaaaacgatttccgcacggcgattttcggaacgattcatgaatgcgggcatgcgatctacgagcagaatattgacgaagcgctgagcggaacgaacttatctgacggtgcatccatgggaattcatgaatcccaatcgttattttatgaaaactttatcgccagaaatcaacatttctggaccgcctattatgaaaaaatggttgaggcttcgcctgatcaatttcaagatgtgaaaagagaggactttgtacgcgccgtaaatgaggcgaaaccgacctttatccgaattgaagccgatgagctgacatatccgcttcatattattatccgttatgaaattgaaaaagcgattttcagcaatgaagtgacagtggaagaactgcctgcattgtggaatcaaaaatatcatgattatttaggcattacgccgccatctgacgcaaaaggcattttgcaggacgtacattgggcgggcggcgatttcggctatttcccttcctatgcgctcggatatatgtatgcggcacagctgaagcataccatgcttgaggatctgcctgaatttgatcaattaatagaacggggcgactttgagccgatcaaacaatggctgacagaaaaggttcatcagcacggaagacgcaaaatgccgcttgacatcataaaagatgcaacgggagaagaattaaacgttcaatatctcattgagtatctcgtcggcaaatattcaaatttatatttataaacgaaacgcccggcatacaccgggtgtttttctaaaaattctaaaaagacgaataatcgaaaactaattctttgtaaaagttcggaaatattcaaatttcactatgcaaaagaagtgtatcttgttataatttgattaatatcatacgaacactcatataatcgcgtggatatggcacgcaagtttctaccggtcaccgtaaatgtccgactatgagtgagcaatggaacggctttattcggccgttacgtgtagatcattcggcattgcttgctctttttttggagagcgggcaatgctttttttattttttataagcgggggtaatcattgtggaagcattaaaacgaaaaatagcagaagacggaatcgttctttctgatcaagtgctgaaagtggattcttttttaaaccatcaaattgatccggttctcatgcagcagatcggccgggaatttgcgcggcgttttgaaaaagacgagataaccaaaatcgtcacaattgaatcttcgggcattgcccctgcggtaatggccggccttgaactcggcgttcccgtcatctttgcgagaaaaaggaagtctctcacgttaacggatgatctgctgacggcgtccgtctattctttcacgaaaaaaacagaaagtcagattgcaatctccggaaatcatctctcgaaagaagaccgcgtgttaatcattgacgactttttagcgaacggacaggcggcagaggggcttttgtccatcgtaaaacaagcaggcgcagcggtttgcgggatcggaatcgtcattgaaaagtcatttcagccgggaagagacgagctggtaaaaaaaggattccgggtcgaatcactggcgagaattcaatcgcttgaagacggaaaagtgacatttgtacaggaggtccgttcatgaaaaacggctatgccaaaacactttccctcggtatccagcatgtgcttgccatgtatgccggcgccgtcgtcgttcctttaattgtaggagcggcactgggactgaacgcagaacagctgacatatctcgtatcaattgacatttttatgtgcggggcggctacgctgcttcaagtatggaggaataaatgtttcggcatcggcttgcctgttgtgctcggctgtacgttcaccgcggtagcgccgattatttccatcggtaaggagtacgggatttcagccatttacggaagcattttggcatcgggtctgcttgtcattctgctgtcatttttcttcggcaagctcgtatccttttttccgcctgtcgtaaccggatctgtcgtaagaattattgattgagtacgacataaacctagttatagtagaccttgatattcaaattcttcgtaccatctcccaaatcctcgaccgtatacgttacatgactaatgagcatctttagtattaagtttatttcagagttagacatcccctcagtagactcaatcatctcctgcactttatgatgactccatttttctttttttgtctcagcgctaagagcattttgaaactcagtagatgcaattaattctgctaaatcattttcagctttttgaagtgtctcttgtgaaattttcagcttttctttgtactctgttttactgatgtccccatctaagtacatttcctttatgcgttctattcttccctttgcctttttaacagctttttctcttaaaccaataagctgagttgtataagagtcatcattaacatcttgctcagtaggggagaagagagcttcattgtatttttttatttccttcataattgactggaacaatacttcttcatgaattccttttgtttcttcgcattcttttgttctttcagcagattttcgtaaacactttctaacgtgttttcttctgcctttgggttgttctatagcttgtgctttatgacaataaggacatctaacaataccagaaagcctgtgggtattcatatttaaacgtcttccagccactttatatgttctaagtttttctattctattcaggattagggcatgttcttcatcggttttcatggtttcatgatgaccttttgcaattaatacttcatctagatttttattttgaacaatactgttgttgcttttgcttttcttgtatttaccaaaccatacataacccctatgaaaatcgttggacagaatttctgaaacaacttctccgtaccaaatggaacggccggatggggaagggactttcagttcgtttaacatctcagcaattactgtgcaagaatattcctcttctaagaaccatttaatcatcattctatatatttttttcttttcctcaacaactactgcagctttgagattcttgtcccacttataaccgtatggaacagaccctgaatgcagtctgccttctcttgtggcatttttctttccgttaatcgttcttcgttttattgctctatattcacttcgagcaattattgattcaaactcagaaagcatttcgtcgccttcaattgataaatcataggttttttttggtgtaataaacaatgttccactctgcttaaatgcttcaagtatacgtcctgaatcaatttgtgaccccctagagagcctgtccattgctacagcacaaactgcatcaaactcaccattttcgattcttggcaataataatgagaacattggtcgctcatcaatagtctcacctgaaacaacttcttcaaaccactgaacatttttaaagttctctctttttatgagatattctagctcatttctatgtttggcgagtgtatcttctgaatctctgtcttctctggattttcttgaataaactgctattcttgaattttcgtgtaacgccaagtatttcatcctttcttcttattgtaagtgtagttagattatatcatgtgcattggaatttctttataaaatcctcattttaacgaaacattttagatcagcttgcttattaatctaatttaaagtatcctaattgatgtatcataggggtttaacagccactatagaccacagagtccctcacagagctctgtggtttttatttagatagaatatacccaaataaaaaaagaagcctcagagggcttccgatggattaattcttctcacatgcaaagttgtcattatcgcgatccatcttagatgtataagcagggtgagtgcttggtacgccatgcgggtatttctttctcagctctgtgcagtttgcaaagtgttctgttcctccagcagaaggggaggcttgtgcagagttagaagagctgcttgatgctgaactgcttgaatttgaattgctagggttcgatttatgtgtctcggattggtgtgttgtaactgacttttgaaccggcttagatacacttactgatttcttcggtttcgttgcgcagccattaaatcctttatcagtcgcatatccattcttactccaaatcttcaagtctttatctttcgcagcttgctcatctttcttatacgtgtctaaatacttcgtgtttggctcatatacataagctactcgtgctaatccttctttaagcagtgtttcttgtactgatttgccatctgcgtaaacgtaagccaacattctgccatacttatctgtgcgatctcctttatcaaactccagttgaagcttgccctcgttaactagctgtttatttcttgctgaagcatcctcaccatatggttgtacgcaagagtttggtttcttagtttcaggagtgtcaacaagcaaataacgaactgttttgacttcgcctttatagttaactttaatcgtgtctccatcaaccgttctgttaagtgttacatcgactagctttttcttattgtcagatgtctttttatccgacgaatccttctttgaagcattttcggctttttcattcttgtcattattgcttttgtcgtttgattgagagtctgtctttgtctcttttgtatccttttcttcttgttgcgttgttttagccttatctgaatctgttttatctgtagaagcagaatcagacccacatgcagccaaagaaaagcttagagataatgcgccaatacctaacaaccatttcttcaatgtaattcccccaaatttgtttgttctgtctctatatcggacaaaccttcctaattataaatataaaaccaaagattgtaaatttgattttgtcattttaaaacactcaaataaagttgtgtggtaaaatttagtggtctaaaccttagaggagggaaagttatatggaagaagggaagttaattcaaatgactcttaatggaataaaggaagctgtttctaaatacggaacattccctatgtttcatcatggagggtatgtcatggaagatgctacttttcatttcaaagatcctgctagtcctcaagaaattagcgatatagaacagaagctaggtgttaccttccctaatgactataaagagtttttgttacagcacaatgggatggaaatgtttgatgggattgaaatacttagcttagagggaatcattgaatataatgaggttcaagatttcccagagggatacgttttaattggatatcattttgatggaagatatgtcatagacacaaacaaatcaaaaaatggattaggttatatgctatatctagactcaattgatgatattgaagatgcgattaacttagattcgaattttgaaatatggtttgatatgttagtttcttccaatggaacgaaatattgggaagtgaatccgaatatccgagagtattataaactggtttcagaataaaaagactccgcataggagtcttcatctacgttcatctacaattttacttcttttttgtataagaagcccaccatggatttacttctttcctgtgaaaattcacatcgataggaattaaattgcttgtctgatttcctccaccgtactctctaggtagttgatgatgaatctcaaatttcacccaagtttttttgccgtattttttatcataccatttcctatatgctttgcgttctgtagttccccattttactcttttatcgctaggcacccatttaataaatgcattaggtggagctaatatatttaatcctgattgcttatctgtgtaattggaggggaaaaacattcccttcatattcgttaggtataatccttcagtccaggatatcgttctaacagttggttttttccctgcccaagtagcaattgcgccgccagtatacttccaaaatgttgttttgtttacattaataaattgatgaacttccgatccctttttcacttgaggccctacaaaggtctttctaatagtatgggggcaagtaaactgtttattataataaccacttttgcataaaccctggtgtacttctgctgacgcaggaggaatccctactatttttgaaatttcaactccgtgcatcactttattaacttttccacctaaaaaagtgtgactgaaatagataatactttttgcttttttctcaacagttttccgttggttttcagaggtgacttgtccagatgatgtctgattaccatctttgtcataagctatataagtctgatatgaactttcaacatccattccttgttccttagcaattttttgcaacttactttctgatccagctaattctcttttagaggaatcggtgttttgcggtttttcgtttactgttgagatacgtttgtttaggtcaatgccagttgcattattatcagtgatttctttgtttgccgttgcctttacatcatggaggggatagcaagagaataataaagagagagctattacaactaaccaaatgctttttgacacatacttcataatggtttacactcctttttcttctgtttaaacctgctatgagtatctaagatgtaaataaataatatattttacaattaatacctccttccgcgaggatagtatcaccttttccattttttatcaactgaattaagcctattttaagattttgttaaagttcaaatctcctaagaaagagaccttcgacaaaaggaagaagctctccttacatgtaattttatgtggtaaaatttagataagattgagtgggaaggagacagatatgaaggtatttgaagcatcctcgttaatctcagcagcggaaaagcgagcaaaagaatacgatcagattagagaacaatttatcaatctcagaaaagcatttcaaggaatggctgatttagatgacagcgagttttcaggtaaaggtgctgataacattaaagcattcttccaagatcacgctggtgttacagacagctggcttgatctgatcgatatgaagattgcttttcttaacagtatttcaggaaaagtagctgatgccggattagccgattcgtttgtggaagagtcatttttagagcatgagttgattcatgcgaagaataagtcaaaagccatcatgcaagagcaacggaatgaaatgagggatattcttaatgagataagtgatattgttcatcttgatgttttctctacagaggatgtcgatcaaaagctggattcagcagataagaaacgggacaataccatacacaagctcggaaagctcgatcatgatctaacgaaggaatatgcagaaaccgaagcgaacgagcatttcatccaagccgactttcaacagcttcaaaatgccacgggtaaagggaaaaacgcaacaccacttcactataacgccaaggcgtacagagaaagtgacatacataagaaaaaaggcgagattgcaagacattcggatgcttatttgacgattaaaaaggaagaagcgaaagagcgggaaatcaaggatctgaagaaaaagctcgctgacggtgtgaccgatccggatgaatatttagaaatcgcgaagaagatcggctatgaaaaccttgaaccttcccaacaacaatatgtgatgcagcttgaacaagcaaaacagatggaagaagccggagaagtgacttgggatattttaaaaggagccggcgttggtttatatgatgtcgggaaagacacggtaacaggtttatggcagctgatcagcaagcctgatgaagttgttgaaggtatcataggggcagttgctcatccgattaacacgtataattccatttcaacagctattgaggaatcgtatcaaaaagatatggtaaatggagatgcttactccagatcaagatgggtgacatatgcgataggtacggtagttacctctgtagtaggcacaaagggagccggttctcttacaaaagctgacgtagcaggaaaagtcacctctaaagtcagtaaagcaggccaaaaactgaaagatgtctcaattgctgatttattgccttataatccacgttacgatgttgttccggctggaggagttccttataatgtagttaacggtgagaatttaaaggatcgtctgcttcagttaataaagtccgccaatcctagaacaaggttgcctagaaatcatgggagatgggaagggactcctggtaacggtaaatggcactcagatagacctgacgttaatgcagttactaaaggagaacccgtcacttttatagatggcagaccggtttttacaccatggagcaaagggacgattaagtttaaatcaggagaactgaaaggtactaaaaaggattttccagcagtttataaacgtattcaaaaaatgaaaggctttaaaacccaaaaagaagctgaaaaatggctgaaagaagtagttagattaacaccgcatcatttagacaataacaccatccaattaatccctatggatttacatggtaatatacctcacgtaggttcggcatctgatttaagaggaggattttaatgggtatacaggcaatcaagaaaaaaatgagtgaattttatttagatataagacttgataagaacataaattctcatcaagtccttaaaaagtttgaggacgaaaattctttcgacataacagatgaatataaagagtttctcaatttatacggggaatgctggatagaggaagataatgtgtttttccctgttttagaggacaatccactagcagataacggtaatctccggttgggatatttctacggtcttaataacaatgatgctaatattatcaaattaaaagaggatctttcagaacaaatgccggactggattataccgattgctgatggtgacggaggagatcaaatttgtcttggtgtgaaaggagaagcaacaggaaaagtttatttttgggatcatgaattgacaaatggaataaaagacacatttttggtcgcaaattctttctctgacttcattcaaagtctgtttattgaagagacaacagatgaagacgatggtattttatctattgagctagatgatgatttattaaacagttaagcaaaagtattgcaattgcatgatgtagcagcataagtgtccttaggcaaagtgaaagtggtttaatccataaagcaatagtattgcaaataccatttttatgtggttataattagtgtagatgatacagttatataattattttttgcatttgatttgtggaaatgcataaaataaaaagaccagggtgttggtagcaccccggctctgtacaaaaagctgcccatcaaagggcttgctcagcagttgttcatgataggcctaacccttcaggtttccaggctcaagggaggtctattttttatttatatacgtcaacagggcgattataaacgacccgaatgcaagcattaacattaatgcctgaaatgttgacataagcatcaccccctttcgtaggggatgagcaagactcccttgagtgagcatgctttaatgtacaggaatcattatacactaattccaaatatatgtctgtgattattggagccttattgacaatagacaagttataatgtagtacttttctttttgaaatttgtgttataagatatattaagattttcaacaagagaggaaatttatcatgaagaaagaaattttgctaattcataatggctcaagcattacatatgcagacccacatgaagctgctaggagttatgctaaagctgtcattgatggggtaaatcctaatgaaatagaactatatactgacattgccgtaaatcttaaagaccaagctaaactgatgaaacaatttaaccaggaactatctaagattgtaaatacaagaattcctatgatggaagaaaacacaaaagagctaagcaatgaaatggaaaattcacatcaaatttataagggaatttcaaaagaaagcataaaaagaaaaaggattagaaaaacgaaaataagcaggctataaaaatagcccgtcatttgcgtgatcagaaagaaaagcaatactttgtgccggagtttttaagtgtgaaaataaattactatgtcccccttacaagcatacattgtgatatgtaaggggggatttttcttgcctagataccggagcgctcttcgcaagagagggcctttgccttttcggtatgtgttgcttctgtcgtttgctttttttatcatatcgacggtcatcagcctctggatgatcaactcctcaatcaaaccggtgctgatgaacataggagaaatggaaaccaaacgggtggcgacagaggtcattacggaatccattgaagaatacatgtctcacagcgacaatgtgaaagatatggtcgatatgaaaacggatgaaaacggaaaagtcacaacgatggattttaatacacaaatggtcaacagtatgaaggcgaaagtgacaaagcagcttcaggctcatttgaaggaagcggagtcgaacaataagcagcatgaaacggaaaaaggcgcgaaaacggccgatgaaattatgattaacatccctttagggcaggtcacgggaaacagcattctcggaaatctggggccgaaaatccccgtgcgctttaacctgatcggtgatgcgttaactgatgtgaaaacaaaaataaagccgtacggcattaacaatgccctgatcgatatcagtatttttgtggaaattaaagtgaaggtcattattccgtttgccagtaaaacatcagtcgtgacaaataatattccggtctccattaaagcgattcaaggagaggtgccgcagttttataacggaagcggcggatcaggtgtgacgccttccatccagctgccgaatgaaaaaaaggagaaagacaaataaagacacacagccgcattttcttctggcggctgtttttactttttcctgcggatttcttgaaactgaactcaagtatcgactagagcagcccataaagcttagtggatacttgctgaatagtcatttccaacaattacatcgaactattgttcttatttatattgaataaagaacatttgttctgttaatattagatcaataaaggagtgattcaaaatgcttagagatcgaggggcgatcaaatggacttccatgatgcttccagaacatttaacgcaattaaaacaggacttgttagatgtttcgaaaatggagaagccatctttagatgagcaacaaattgaggagattgacatcctggtttctgaagcaatggcgttgaataaagaactaaagtttaagctctttaaagaaggggttgctgaggatttaatcggtacagttcaatatctcaattacgaacaacacaaattacacgtaaaagatcatcatgatcaaaccgtatacatcaccatgaatgacatcataggagttgcttacaatgattgattactcacagtttccacgtaaaaatatactttgtgtagatatgaaatccttttatgcttcggtttcagctgtaacaatgggattgaatccaatgacatgttatctcgctgtagtcggaaacacggatagacagggaagtgttgtcttagcagcgtctcctgcacttaaaaaagattatggaatcaagactggctcccggttatttgagattccagatgatccaaaaattcatatagtaaacccgcaaatgaaacttttcatcagagtttcaactgaaatcactaaattgttttacaggttcgttcctgaaacatgtgtgcacacgtactcaattgatgaatcttttttagatgcaggaaaagaaaatcctgaagtcatggcagaagcaattcagagcagtatgaagagagagtttggcttagtttgtactgttggtattggtgacaatatgttgctgagtaagttagctcttgatttagagagtaagaaaacaaagactgggattgcacggtggagatatgaagatgttccaaataagctttggtgtgttcatccgttatctgaaatgtggggaataggagggaggatggagaggaatttaaaccggatggggatttcaactgttggtcaattagctaaatatccattagagctacttgaaaaacgattcggcattatgggcaatcagctttattatcatgcacatggaattgacctttctgaaattggagctcctttgatgcaagggcaaataagctacgggaaaagtcagatattacttagagactatacgaagaaagaggatatcaaggcggttctcttggagatttgtgaagaggttgcacgaagagcacgaacacataacaaagtagggcgcacaattagcttgggtattggttacagtaaagatgagttcagcggcggctttcacagagctaaaacgattgatttgcctacaaatatcacaatggatatttatcgatattgcttgatgttgtttgataaattctatacaggcaaaacggtacgaagtgtttcagttaccttatccaatattgaggatgatgtaaatcaacaattaagtctgtttgaaaaagataatgagaagagaagaaagcttggattcgttatggacgggataagaaacaaatacggatctaaagcgatcttacgagctgtttcttatacacctggaggcacagctttgcatagagcaggtttgacgggtggacataaatcatgagaacagagagcagctccctctgttctccttacaaagtcattagttttttacgtttcggctctttcagcaaccttgaacgtatcattttgttgttggagataggaagcacccactgttccggcaacgccgaataatagaactgcacagataaatagtttagttttcatattgcttctccccttttgatttgtcttcttgcttcatttgccaaacgataaaattcaactgcaccccaagcatcctgttttccagtgagaaaatctgctacagagacaccatagctttccatgtcagggtatatacttctttctttgaagaactcgaatgttttcctaactaagtctaaatcatagtccaagaaaagtcctttaaccatttttaacttttcaagtaccatttcattgttatgccgttcagccaactgtttggcctgttcataaaatttttttgcgttttcaatgtcattttgccttccctttaagaaggagataacaaataatgttttagcagcgtaatcatgattttccggctcaatgatttgaagtgacttattaaagtgaaaaaatgctttatcaagttcttccatttgattataacataatccaatattaaacagtgctgaacgcatcaaatgcccacgattcttttcacttttgtttagctctactgcttcctgatacgctttgtatgcttgctttaaagcttcatcaaacttcatactgtccaataaattaccaaatatgacgaattgacagcgtaccttttgtaccccgtatgtagggctcccgtcaatagcaggttgctttttaaatatatcgtaagccctcatggcataattcattgaaaaataagtctgtttcatgtggtaatacacttctgacaatttaaaataaaattcagctttttcaacttcaatatcttcgctctcaattgaatccaaatatctctcagcttgtctatagtgattaagggagaatgccaactccttttgtctaaaatagaacatgcccatgaaaaaataatagtaatattcgagcattccagttaagttttcatggccttcgtatgcttttaactcaccatagtttttctcaatgtcttttatagcgttaggatacatatatgccaacattagcttatgtctaaactcaagtagggagtagtatagtaaaacatcttggttttcttccataatttttatttcctgcataacttctttacgcatttcttctgctctaccgacccaattctttttaatagccacataccaatgattcatctttgttgctactaaatcataaggaatgaccttttcgttctccaagtcctaaacccctttcaaatccattttattatatagttgcattggaggaaagaaatgtaaagggaatttgagtgaaaattaaaaacaaatcaataattcgattatgaacgaaacgaaaaaaataccctcctcgttagagaagggtatatgatcagtttgctgttgcttttagagaagcaagccactcatctaatgttccagtgaagccttgttgaacggctaattcatatgctgattttccatctttaccggcagcaccagtagctcctttagcaccggttgcaccagtatcacctttgtctcccttagcgccagtagctccagtgttgcctttttcaccttttagtgaagctaaccattcctctacagttcctgaaaaaccattgtccactgcgatttcataagcagacttcccagtgacaattgagacattaaccattggattgaaaaaactcatttatgcgcccccaaaaagttatatgtaattcctgactcagaaattttgaagcttgtgataggtgaatcgtgagcgtccatttgaaagccttgtccagcccttaaatagataggatctccaccattgattgatacgtggcatttctgatcattcgaaaagctgaacttatagaaagaatatttaatcgtccaggttgcaggtggggaggggattacttcatggttagattctgacttctcaagcattggacttccgatatatccagatcctatttgcataatcaacaatcattcctttcttcttgaaaatgaaaaaaagggggagataaactccccaagttattttggctctgtgtattccatggcttgatcgctgtctgagatacctgtagtggttggatccactacaaccccattgcagttagaaatgtaagcaaagcattaaatttctcagtaagatcatcgctaaacacagaaatgtcgtatccaaatgcagatgcaattgcttgtgcaaacaaaagagttgcagagaagattgcaaccaggaatgttttctttttaagtcttactttccagttaattttagtcattaaatcgtctccttataaattagctaatttggtgatatcaacaccagcgatctctgcaccaagcagtaagagaataattagaactaaaatctttaatgtcttgccgaatgttccttctaataagttttgaagccattttgtttgcgactgattaacttgctgaaactcatttcttagtccagctatctcagtggtgaacaaattttttgtttcaacaaggtttttttcctgattctcaacaacagtggtaagcctaatgagcgattcacttgttgttttttgtgtttccaacatgatttttctatcttctgcttgttctttaagacgttcttttatatgagcgacctcggtctttaaaacttcatagttttctttttcagccacaatgcaatcatcctccataaaaaataggaggtaatgtcacatcacctcctaaataatcattgatacactttgagctacaatcattctcaaagatatttaaatatatttagatttttgagccaaattgtcctgagatgtagcctcgtttacctttgtagataacttcccagtaacccttagcattgtttaaccctttcactgagccagaaatgctgacggtatcacctagctccacagtgccgagattcttcgctttgtttttatcaggtctgtccattacgatagcagcgctttttactccgacaactttaatcttgcctacagatttgattccactgctatcaggcttagaagtgggtttaggctttggggttgattttccaagctcagcatcacttttaatgtatttcacatttacatatccgctgtatgtagcgcctttggagtttgtatatttgatataaccccaaccattttgagttgatcctttttggtattggacagtggagcctttaggaagggcaagtacaatagaggagttcgcattgcgctgagttctcacattaagactgtctgcgataactgtgttcttaacataagagccatttgttttaacgacttttgttggctttgaagatgaggaagaagttttcccgccgagtgctttcaattcagcagcaatagaagctttaacagcattccaacgtccttcatcaagaactcgatgtgggcaatacttgccagaccagtcttgatgctttttaactcgatctatgccccagccacgttctttaaggagttgtgcaataaacttaatagccaacgcttcagcttttttatagcgctctccgcctgatttagagtagcaaacttctacaccgatggaagtccggtttcctgaattcacacctgatccatcacccgtatgccatgcattacgatttgtaggaatcccttggacaacctctttatcatctacagcaaagtgaaaagaaacttcattattgttaccgatcatataactaacttcattttgcgctggtgcgtcgttgtatgtattgtgaaaagtgatgaatgaagcagataatgcatatggacatttgattgaatatttgtctggtgatactaacatttgtctcgcttgaatagccatattaaacatctctcctaaattaaatttgagcacaaaaaagagagaaggggacaaatccctatctctctttatctcacgtatgctcttgttatctctgtttttgaatgccgtaaattgaataaaatttatattttaactagaacataaccacctcctttaattttaagggttacttaattaagcagatggcaatgccgtaaccgagcttgtctgaatatggagttacaatctccatagccttccaagagtaaaacctgtcttctgattttgtgccgattccataattaccttcaattcgatctcccacagaaacagtactgtccactttcacataaacctgtccaagcaatcctactatattccattcaggacgttcttcacgagggacgtaatctattttttcaatccactcagggtttactttaggcagcttcttaacatcaccggtttctgggttgaccacatcttcatatatgtatccaccaaactcattctttaaatatctaccttgccagtgaatatcagctcctcctagaatagttcctgcagtttcagagattactccgtgtacatcttcaccttttctcgccgggcgaattttagctccttcaagagtgacaattgtccctgtcggaattgcttttccgtcaagactttcaaaatactcagcgtaatcactaaaggtggctccgccattcatctttcctgccgatgttatatccccattcatggagtttagcatccatttaatatttgctctggacggagtagcgccatatccgccaaccaccatatagcgatcattttcaccaagttttacacctccagaagcgtggatttcacgtgatacattttgcccctcgatatgagaatcattggagttgtaaacaccgctacgagatccatctacagagcttccgcctgatgagccgaaaacgttggttcttgttccctttgcaacgcatcctccggtagtagctccaactaaagtggcatctccaagtgcttgaggttcacccgatgaagctaatactgcactagtatttgttttagcatagccagaagtcgtagccccacgtagaccgcccttgaaattattcgggataaacgtgtaggtttttccggcaattttactgggagtagcgtattgttcacacatcgcagcgctaatattagcttgtgaattcgtgcagtaaacacctatcgaacctgctttgtttgatcccgtcatgttaacgttattgatattgactgagccaactttacttcccacagcaataccaactaaagcagattggttaatggttacattcgagatgtttacattatctgatttttgagctccaccgattacatagatatcgttactcgctgttgtaaatcccgaaacagtgatgttgcttaggttgatatttttgcttttatattgggtggtgatgattgcagtgtttttataatcataggttggatcaccaattgcgttgaagttcgaaacgttgacatttctataagcggaaatgactagtgcgcgaggatttaaaccttgataaaggtcactgaaaataggatgttgtgcagtgcagttaacgacattaatgtcaaatgcacttgtggagattttttcggaggctaggtggaagccaatatgtctaaagtcgaaagcgcggatatcattttcggaatagcagtttattaagtttacgtttcttgctgcaggtgctctattgtgagctttgacttcaaaacccctgcaattttttcggctgtaacagttcacaagccatacgtttttagagccatcatcaatttcaaaaccgtttgaatttgaagctcctttgctgtgtgcggatccattagcgtcataggcgtaacagttagtgaagaagatgtagtctgaatagtgagttgtgaagccatcatcaccatagttagttgcagtacaattttcaatccaaacatatttgctaccatttggctgataatgatctgctccatcagaagaagagttccaaacaggggagcttacatcaaaaccgtgtacacctggattacgagcattgacgtttctaacccgaacaaatttagagttaacaatccccacacagtttgcatttgttccatttgtaatggtgttgtcctttttgtctaaattccaatcgaggtctaagtcttcaattaagatatattcgtttccgtttgtgtagtcgctattggttaacacacaagatgttccggtagcagttgggtgaagcttgataatagatcctgatccaacaccgtaaagtctgacataagaagggatatgtaatccttgaaccatataaatacctgcgggtacaaaaacttctcgcttcccgctggcaaaggcagctttgaaagcttcagtgtcatcagtaacaccatcacccttagctccaaaatcctgaacattgacacttcgtctgataaactcatttaagactttatcaacaattgttgcaccagctgcagggatttttgaaatgtctccaatagtgtttgtgatatctgttaaaccagaatcgactgtgcttattacgtttttaatatccttagaagctttatcaaaagcctcttgaatatcgtctgcagtatatctaatattatttgattttaaccctatggcatcaatgggtatccattgctctgtttcttcgtccttatagcccattgtgtttacgggaattaaattgtcgctcaatatatactcctccttatccttttctaatccaaaccatgcttccgtcagggggttctacagatggttttatcctcatctttttgggagcattgttcgttctcaaccatactgatctgatgttgtaaggctctacatagctagaaacaatgttgaaaccatcatacttatctgacacgctaatatttatccagtcgaaaccatcccatcgatattcaatgcctgtttcttttacagtgacagtccaaccaatttgaggggaaggataagtgttcaataaatcctgataggtgtacacaaacggcaagtaaatcttcctagtattctcaactacatactcataatctgatgttgcttgtctgcaccaatttgttatttcaatacagcgcttggtgacacgttcacattcagcaatacgttcattgatacgaataatggcatcttcagcatcatcaattaagccttgaagcgtttcaatgaccatatttccttgtcgtttaatccaaattcttgaggcagggaagaaggatgcgccttctccttgatatgcaaaagtaagtgatttgccttcatttgaaccattgaaaaagacaactcccataaggtaatcaaccttaaagtagttgtcttctaattcaccatcttcaatttctcgccattctttactgtcaccactaacctcgactctgtactcacggttaggtacttctgtaagtaagactcgaccattgtaaacagttaaagtttcactatagcttaaataagggtcatcgattgaacccttccttttttgagaaagggtagggtcgttatagagctgaggaaaatccaaactaaattcaccgtcctttcttattgtgtaattgatttgagcaattcttctaagtgcgcgactctctcttctaaactctgcagtctgcccttagtaccacctaatgtttgtcctctaataatggattcagctttcttgtcaattacgttgtaaacagacttctcatctgaaattgcatatacagaatatccttgccaccaatcttgagcttgaaaaactctaacccatgcttcaaaccaattcgcctgaattgattcattgtattcccctaggtcaccgaatgcgttatggggctgttcaggagagttactgtaaggtgggatgccaagttcaccaaagaagatcggcttattccatttatcataaaatgctttgatttccttgaatatattttgtccgcgtccgtataacggtacgctataaatagcatcaattagctgatcgacagatggatttcgattatcagttaattcaaagtaagccgctattgcaataatatcgactagtccgaatagaggattattcagctttttgttgtaggcagcaatcgtttcgggagcccaatcagcggttacccaataatttgttcggtagagcatctttccactgaataaactcctaacgcttgtaataactgatttccacttttctgttgagtcttccatatgaactaggtttgaagcaatgtataaaccgtctaatttaaattgttcgcattttttagcgaagtcttgcaggatgttgttccatgctacgaaccattggtctagatcagaaggtgcccaatcggtttcagctatcgttccatttgcgatgaaggggtagggttctaaaataatgttgtacccgtcatttttgagtttagggatcatatcccacgcttcgttataagtgtaatccacaacagttggatttgagtctgaagcatccacagcattaataaggataggaatagtgattgtatttaagtttaaaacagttgagtcataactaacatcagcataatatttacgaccaaatgcagaaacatttccgcctttccatttcaggggattgaccaaaaggttattgagctcaatgttttggacacgactatcatagtcggagagtttagtgtcaacttgtgctgctgtggtttcaactaactcagcagttttctggtcactggaaacccatttttcgccgtcataagaggaaacaacaccggtaaccgtattagtccataaatcgtttgcttctggctcttcgggttcagttgaggagacagtgtatttcgagccattaagcttacctttgacttctacagtagaagaggggaggtaggggttttctgaggggaatttaggctgtacaatatcagatagtattcgaccactgctatcaatggacgtctctactgtgcgataggcttggactccaaatgtatagtgtttatttgaaacttgaccggttaatgttgcaattcgtttatcataactaactgataaatattgttcagctgacatctttgcaccaaaaagataggtatcatctgatgtgtcagagtagcaatggataagaaaaccatcgatattgtatttatcctcatcggagtctggaaaatcccattcaattgatacatctacagatccattatcatttacaacatgagttatagcagtcccgtcatttcggatagttgggtttgctacgggtgcagatatacgatcatttcgtgcattgtaattggtcagtagggtatcataatcaatctttttcttattgaattcagttgatgctttcttagcagtatacaatgagcgtgcaaagtcttgttctatcgtagtagctctttttccattcgagagtgttacttgtatactttgctgctcaaaatcaaaattcattcctgtaagtgttgctttgacatcagttctaaaatcgtcattaactaatctgattatatctcccaggtaaattctatcccaaaaatccttttctttgttgacagtgaataagttgacaatgtttgttctgatgtctaccggaggtgtatttttctccccaagttcctcaaggcctttttcatacagctctgtttcatcaaaaatgttgtcattagaccaatcatcttgacggataaaataagacaactttttcattagcttttcaccgagaaacttatccatagataaccgatcttttaacactgctatttcttcagttatcttggaaatctgattggcagtggtggatatttcagctttctttgatgtaacttcaagttgtttggcatctctttgcttgataaggtctttcgtgtcatctccagctttttttgctactgtgatcttatctaagatttgttgtaattcaattttttctagggtgaagagggtattctcctgtgttgtttttgttgcttccagatcttttttctgatttaaaaggaggtaaaaagaagagccttctttatttacaagttcattgtaatctaaaattgcatggcacaaatcatcatccatgtaatcactatgcttaattacatttctcttttcatcacgttcaaaagggtagaggaaataagagaaatcatccaagtaactttgtccagtaggattgactgaattaataacaattccatctttaccggtaatgtctaatcgtgttacaacttcatcaatatcaatggtatcttccatatcaatcatgaaccttttaggagagaattggacacctttatacttggacacagtttcttttttataaaatgatactgtgttgttcacagtatcaaatataggcacagcctcaaaagtttctccaatgttctttaaaaactcatatcgggtagaggtaacatcaaatgagcggcgtttttcattaaaagaggggtcaataaagtctacagtaaagcaagttcctttaagacaatctgtggcaacttccaacagatttttagagatgccttcatatgatttgattttgcttttatgaagaatgtagggaagtccttgagctctaacttgtattgtttgttcctcattttctgactttgtcaatccggttattacaaaccattcaactctgtttaagaactctgccttaatgagataccagccttttatgagttctgccacatggtttggcttcatcttgaaattatatcttgctttaagtgggatattaaaagttagatcgtggagttcatcaaaattcaaatttagagaggcgttagagaaatctactatattagcgattttctttttatttggttttgctaaagaaaccttgagatggcctggtttaaaatcgtaaatcaataaaacatccccttacaaatacttatatctgtatataaaccggatacaacattcgcccgttattttaactctgtttatcccccttgttaaaaaaacatactgttcattgacttgatcataacactcatacccagtaacactggaggtgatcagctctttattggcatctacattaataacttcttgatgtttaattgatgtgaattttagaggttctttataagctgtcaagttttcgactgtgatgtctccatcaccgatttttttgaattcaagagagagtgggatatctaaatcccctatatttttaatttctatattattagaacctgatgatatgtcataccaatgggtagttgtttctcgtccatacctataaggaaatactttcattgtcagcttcacatatccgtcattagagcagttgtgtaccaaatctgttgcattcactggcaaagcaaaataaatgatatctaaattactactgaatgaaagaggcttataatcatctacatttagccaacgtgcaactcttcgaatattttcttcatctaaatgatcttctatgtaaaagtttaaagggatttcatatggttcacgtttaacactgtctacatacggttcagaagctgatcgtgtatatgtttcatttactgttctattcgctacgaaggtctcttccaatagtccgccctctgtgtttacattcactgccccaatttcataagaggggatatcatcgaacatgaaatattgactttctctaatcataaaattccacccttaccaatcaaaaagcaagctgaagagcctgcattatacagactcttacatgcttccatttaattttataacttctttcttgatggtttcgagcattgttctggctccagtttccccaccagtaagtttatcaacattgaaaattattggtgtgttaattgttttatcaccattagaattaacggttgtggtagggggcaggttagcagtcttaacatttggtatcaaactattagataggctcgcttggttaatattcggaattattgatggaatagaagtaatccctttgttaatcaaagctgctaattttccaccttgcccccatttaggtgtttcattattcagatcgttatcagacagattgcgaacatactttacagtttcaagcatgttcttggtgtcagtcttattcagaataagctctttatcatgaagaatagcaagcttgccagcacctaaacctgttcctgtgtatcctcctgtttcaaatgaagatatttttttgcctgttgtattgcctttggtcacagtattaagggcattagaagcttctttaagcttatcgataaggttattagagatacttttaccaatggactccatattgctgttaatgaatttagagaattcattcagttgcttagcaatatcagtaatcttcccatccattagctttttctcaagttccttaaatccacgctcatcattgacgagatcatcatatttcttgttaattgaatcttcgtctttttgaagctgatcttgcaacgcttctttacgtttgctactttcacgatctttaagaaactcatctaaatctaactgttccttttgtaactgctcagttaattccttaacctttgacttaccaaattctgagtcatcaagagaatactgattaatttggtcagtgagtttttggatactctcttgcttctcttttaactgtctttgaaatttagcttcatcgtcagttttatcgatctcatcaatcaagtcttgtgttgctttttggtgcgcttttaattcaatatcacgcatcttttcgtacatctctttatagatggagacaacttcatcagcaagggatttgtacacatctttgattgatttctttgtgttgtaaagctccagattgtaatccttctgcttgtctttccagttctcgatttcttcagtaatttgtttctgaatatccgggaaccctttagcagctttcttttgtgcttccaactgttttatatacttcttcgcttcattctgttgctgctgaataagcttaatctgttggctataatatttaaccttgtctttatcttcctcggtcatggatattttgttgctaacatctttaagcttggattcagttttcttggttgatttctctataccgttaagcgtttcatcaactttggattggatgagctgtccctgaagttctcttacttcttcttggaaattgatgagatcaatcttagcttgttttaattcctcagcaagctgtgctctttgagcggcattcagagttttgtttgttttgatttctttttcaataaaagaaaccttctgactctgaatcttttgctgttcagttaaagcttttttctgatcgtttgtatacttacggaactctttactatcgctcagataatgactagcgagggctttgtctttagcgattcttacatcaaaatcaccaatgcgcttgtcatattcatcaagatgcgactgaacgatctcatattgaagctcttgtatctgatcgtttactgaattaatgtcaccttgaagggagaggaggtcggatttagcttgcgctattgcttgttgtcgttctgcttcagcttgagacgcatctgaaatagatgtaccgacaccttttaaatacttctcagggtcaattgtctttccgttttcctcaatttgaagatgaaggtgatttccagttgaattacccgtactgccaactttaccgatggtctggccagctttaacagtttgaccggctttaacagaaggggtatcaagcatatgcatatacttagcaacttttccatcatcctgctgaatgacaacccagttaccggcagttttactataaccagcaatttggactttaccactttgcaaagacttaattgcagtaccggcttttgcggcaaagtctgtccctttatgtggagttgatcggtaagcgccatcttgagcaccatacttagaacttattctaaacgcgctgttcttcgtgtagtagcttgcaatggaggaattggcagaagtcattgacttcgtgtaatttgacatgatcttctgaacataattctgtgtttctttgaagggagggacgccgccatatttaattacattaccaggccctgcgttataagcagcaagtgctttctcaacattgccaccaaatttgcttagttgttgggctagatatttcgtgccacccataatgctctgataaggatcataaacattgtttacgcctaagcttttagcagtggaaggcatcaactgcatcaaaccagcagctccggctccagagcgagctcttgcattgaatcctgattcttgttggattacagctgcaattagagctggatcaacaccgtatttgcttgcggcagaattaatgtagctggagtatttaccggagtaagacccaccaccagaagaaaaagaaccaccagaagatgaaccagaggaaagggaagaggtaactataccgtattgtgcaatgttccctgacttaatttgatccttgaggagtttggcttgctcctgcataagctttttcttttgttgaagagctttaatttctttctgcagggcatttcgataactttgggaatactttggatagtcgtttacttgcttattgtacttttcgatttcagcattaactttctccagagcttccttgtatttatcagccacgtacatggacgttttggtttcttcatttgctttctcttgctcgtctgtccatttttcaagggaagtacctgattctattaacgcttgtttgtttgtttcctgagtagatgtagcttcttcagatgctgagatgtaggatttaagagcagctctaacgctatccattgcagagatttggctgttagaaaatccaccaggttgcaacattttttcttcaatcttatgtaattctttcttcgcatcagctacattattgattgatttaacttcgagctgagacaattctgcctcggatatatcgagcttacgctctctccgaagctttctaaggctgtcaattcgtaaagaatcagcgtttaaggttttaatggcattattgacttcagttttcattagcttattgctatattgaaccatgtcattataggcatcgagcttaacttttcgctgacgaattacttcatctcggttaacctttataacaccattttcataacttattgctttggctaattctttatctttttggattagagcattagcttcattggcagaaatgctctttccttcagccatcttttctaaaagttcgtttaaaggagcaacttgttctttggtgttattaaaaatatccccgttaagaatgccttgaacagagtcaaactgcattgactctgacatgcctttgattacatctttaatctgactgatatcatttgcgtcaagcgcttctttgagcttttgaccaaaatcttcagcttcattacctgcttcagcaagagtttcccctaaatcaccaacttccgatttaacagaagaaatggccttatctccatctttaatgttcttttgtgccttatcaaaactcaacttaaagacatcaatagaagaactggattttgaataggtctccaaaagggtttgcagatcctttttcgcgctatcaaatgctttttcatcgtttgaattcaatgccgattgcattttctcttggagtttacccaatgcagaagagaatttatcgagatcatcaggattcaaatcatcttttaaagtgagtttacctacaatgtcattgatactcgtttttaaagtattgctgatatctatagaactgtatgcttgggcgattgagagaacactgtctctaacctttgcatttccacttgctatgtcagattgtgctttaagcataccttgcttcgctttatctgcagcgattttataatcttcatcatcagcaaggaagtcccattttggtctgcctttatcattataatcagcaatttgtttgtattgcttcaactcatctttagactttttaatttctttagaagcgtcctcgaaagttttcttggcgctgtctttagtttccgtctttttaagttcaaggtattctttagtgttctcaatagcttcttctaaagctttattactttttaaaattgcatttccttgagagtcataaccttgaattaaagcggggaatgtctgagccaattgctgagtaacttgaagatattcttgctcttcatctgatgaaagggttcttgaatctttggctttttgaagctctttatactgttttattagtttgtctgtggagtctttgttggttgtaattgcttcaacattggtctgttgactctgttcaaaatcatctttagctttttttgcatctgcgaaagatgaaactatgctttctaaagcccaacccaacgcagcaagcgcgcctccaaccactgtagaaactaaaagccctctaagagcagttttcaaaacccttgatgcaacagcagcacgggtcatacctgcttctaatccgatgctagctaaggtttcttgtctcattgcttttgagcctaatataagagttgtagctaaagttcgagtgtttttactgagtaacaatgtagcagtgctaatcgtcacaaaaagagggggaggaaaccaacagtgttaattattccagtggaggcttttaacaaagaacccagagcttgagtgaactcaatcaatccgtcactaataaaggcatccgatgaagctatagccaattcagtgaaattgttttgaagtttatttaaccttgcttgtaagctatctgcgtatttctgctgttcgctccaagcgctacctgcagaattagaagctgttgcggcggcattttgggcgatagagaagttgttcattaaggcattaaatcgagacaattgatggatatttgcaacgccaatagaggtgttttgtctttgagcatcagttaatgtgttccatttggctgctacctcattaatcaactcactcgcagattttgcttctccgcctgcagtctttacagaaattccgatttcatccaacgctttgattgcgcttcggttgttacctatccgggcaaaaatagttttaagtgagttaccaacaacgtttcctgattcacgagtggtacttgcgattgctgtagtataaccaatcagatcgtttaattcaacaccgaaagtcgaagcggtgcttcctgcttttcgaatagagttggccagatcaagagtagttacagcgtagttgttatccacttcatttagcttgtctgcaattgaaatagaatcattggctgcaatattgaagtttaacattgcggcagttaaagtattaactgtgtcatcaggagttaagtcagagacgttttgtagaacctgcgcggtttttgttagagttgacaattcactttcatcgaagcccatacgcccgaaatcaccggtcatttggagaatgtcagtgattttgtttgaaagtgtgtcacctaaatcgattgactcttgaagaagttcattgtacttgtaatcaggctcattcatcacacgtctgatgtttgtcattagagtatcaatttcaacagcctgagataccatttccttgagtccagatatagcgccgtagaacaaagaaccagagattaaatatgtagacatacttttgaaagcttgcgttagctccgcaccaaaagacgaggcttgactagctgctgcttgcgcatttgaagccaattccctgtattgcatgttcaagctttgcatttgagctctgatattgcttccgccggcacttacattaaggctattaactgcattgaggtactcttggatagcttgtctatttccagcgcccatcgtatcgccataacgcgtattaaggttttgtacgtttacctgtgcttggcgttgataaagctcaatagtttttcggagttcattatttttagccacagcagcagacttatcatcgagcattttaattctgttttgtaatgcttcaatttgttgagctgtttgagcagtgtttaatttccgcccaagggaagagagggtggtgtcagttacaattccttgctgtctaagtttttctaaatctatctttagttgttcaattgcttttcgttgctgatcgtaatttgttgtaacttttgatgacgtagcatttgtctttggatcagtcgtatatgttatatcatcgaagccattgcggttcttttgagttaccctcgtcgtttgtccttgagaattcttctgttctgttcttttctgtacctgacctagtttttcagtcgcttgagcaagcctgttaacttcttgggtttgttcacgtagtgattgattacgattgtcgatgaatttcttttcacgctgaatgatttcgccatttttcttatattgctgcgtcagcttttcaacagtgccatcggcatttctggtaaccgttgtggtttctttaattgtttgattgaaggatttgagatgtttttggtaagtgtcaactgcagaggagaattcgttgagagtctttaaagcagaggcatcaatattggtctttaaattaagggaattaagctttttctctaaagatttaatttgctgatttaactgttcgacagtctttgaggaggtatcagcttttggggtcagtattatttttaaatcttgactcaaaaataagtcacatcctttcaagtggggctaatcagagcaaataaaaaagccactcaaattattgagcgactgtacttgttttcttgataattacatccatgacaccttgccaatactcagcgttttttaaagcttgctgtatgatattcccatcttttttataaccttgaggctcatatccatcatcctcgcgagaagggaggaagtggatatagtgtataggatttttgaggttttcgactgtaattttaagcgtaattgacttcaccatttctgtttgagtagaggaggctgacaaaccaccaattgttgcaccaattccgccgcctaataatcctccagcaataatccccgatttggcaaccttcgaaatcacctggtcatccagtgagatttcagattgaataatttgggcaaaagggacaacatactcgtttatttcttctccatttagctgatataccttaaggatagatttatcttcattgtaagcaattttagttttataagtgctaaagaaattatcagggttaaattcgctatcataggtctttagtgtttcagcattttttctaatcttttcagcaacagttgcattttttattctgtaaggttcgagcgctaaataagccaaaccgccaattatcagaaaaacccccaaaggtctccagccatccattaaacagaagaaaaggctgaataaaaaatagccaccataagccataatcttatagcccatccaaccaccaccagtattattttcctacattatatcatgatttccaaaagtgtagaactagcaaaggggagggtcactttcctttttcggacttaatctgctcaagtaattctttaaaatatgtagcagtaataacaatgtccctatcctttcgtacaacaaaaagtaggagaaggcaaatcgatgttgcgattagaatataccaaagcaaattaaaactaaacataattctgagagatagtaaacatgttcctatgagcacacttccaactgtccacattttcgtatgatcgaaggacgcttcaattcgactcatacgggaaatagctaaaattaaatctgatgaattgagcgattttaggatttgaaatttgcgcttttgttctgtgtagagctcaccagagtgcgggaattctttttgtatgtatttgatcaggtcgcgactattcatctgtactaaattgtgtttaagtattgtcttattcatatttttcacctctccatattatcgtcaaatatggaaataagtttaaggttttatccataagcaaaacccttcggtagaaggatcttgattctgcataaaagagggatttcatttacacttcaaattttgctttcttgtcttgaatagcatctttgtttacttctagatagtgattctttgttacgtcagtgcctttatggttcaataattgagacacgtcctctagactcatgccactgtgatacagaaggttactaccactgtgccttaaatcatgacagtgtaattcaggaatatcaattatttctccgattctctttatccaatatccttgtaaagttccggtttcagctttcttccatatgcctccgtactttgttatgaaaaggtattcgcattcaattccgttttcggatctgtactccagccattccttaacaagatcaatagctctttgagaagggaagagggtgactttatatccttctttttcaatgacatcttccacccgaagtctttcaaagtcaatttgttcaaccttaacgttgcttatggcattagctctggccatcgttgagagaccgaattcaaagaagagctctaactgaatattttccttctttttaagtccttttctgatttcttcgacttgttcttttgttaggaaggtctgtttaatttgaagtttttcaccagttccagctttaggcctgtctaagaagtcaacgggattctctttaatcttacgttttttccttaaaaataaaaagaatgagctaatactactcattcgtctctgaattcttcgttcattattgcctagaatactggtgcaaaatgcaacaaagtcttcaattaaatcaaccatatcatcaggatcttctttaataatatccacaatgtgctgattattgtaattctctaaaatgtataccagccattgattgaaatctgattgatatcccactttactggattccgaaaggttcatgtttttaaagacaaaatactttcggattaattccgcatttttggggttaattttgttgaccttttcttttgttgcatatgctatcttttttctggccattaatacaccaccgttattctgttttaataccacttgtatttaaatcttttatcatagcagcaactaatcgtccatcttttaaggattcagcagtattcttcatgactgggcgaggttttccgtaaccatagccgtatttatctggatacgtgtacccttgaccagtctcaacaaccgtagcaacatccttgccgttgtcttcacggttgttgtctaatgaaattccgttatattcgttttgaatgacaaaggagtccttcaaaagagaagtacgttcatatacaagaggatcgtatgtgtcatatacatcagattgtacatgctcttgacccgttttaatcatcgtattttttgtgctggattgtttttgaacggcttgctttgcggcaaattcaattaatgctgctatttcttttatgttcttggccattattcagcctcttgttcattctcaatctcttcgaccttattaaggatgagatcatttatttcttcaggagatatgtttgaaagtttgtctaaattctcttgcatcatctttgttgcttctccaaatttcttcatgctttcttcagggaagctactaataatcaatgggaaaaattcagagtccacaagcttaacaaaccacttaactttgtttttgatatcacttggaatacccaagtctgtaaattctttaattagtgaaaagaatccccattgaacaggatttatgcttttaaagtcaatgtttttttcttgagcattttgtgggtcagtaattaattcagtaagcattttggttaagcgggtaggggagaagtaagggtaaataaaaacatgaacgtcctcagtaagttgtactcgttctttcttgtcatatttacttacactttcttcaatcaacccaagatttaattttttcgatgccatctcatttcctccttatatatcctctgcacacattaaaaaagacacctcaataggggagaggtgtctaaataaaacttgtattttattctgtgtctgcttcttcgtagtcttcgccggtgatttctttgtactcttctaaagtgactaaaccattctttactcctaattggagctcttcttttgtcacatcgttgaattcctggtaagcttctttgacttgatcgacggttgcccattttcgactcagggcattaacccaataattgtatgtagttattttatgaacctccctttagatcagcaatatcttttaacattgtgtttattgttttgttgacttgaagcaagcttaggcggagttgggatagggtctgtcctattatttcaaaatcgttaggttcagggatacttggtttaacgctatccttgtattcttcagttgctgattcaatccatttatttttcttgggatcatatttgggcaagattattgtggggtctgggacagcagttgtactatttggaggaagagcatcgccttcaatgaagtcttctccagcgtacataaagttctcatcataataaagaacatgcataatattttcacctactaccataaaggaattcctatattaaatgaaactctggaaacactgttaatgtcattagcatacaatccatcaaaacgtaaatctccatctgttgtgaaggcaaatctcgctgttccatatgatccaattgtgggtactacaaaatccactagctgtgttggcttggttgagaatttagcaactgcagttccaatggccggcaatgttccgaaagatcctcttagccataacacattgtttacacttgagaatttgaaagggtaagtggagtattgtgtagctccattgataagtgtaactgggttccaagaacctgacgtgccactccatctggctttgtcatctaaagtaacgtgaatatcagtttttgcttcgtgggcatcggtgtaagctttcgccgagctgagtgcggtagtagctcttgcttgtgctccgtcagtcgtctcatgtgtttgccaggaagtccatgttgaatcgctctttctaaaacggaaataagtatgtgttccgtaatatgcttctaatgcgaattgtgcaatcgtagttccatagttcatgacagctaaatagacattggataagttggcaggggagtgaagcccctgatttgcgattaaataaaacccagtgttaatcaaatcattgtactccgttttttcggagctacctttgtagaatactttcccatcatcgtcagtgagtttgaaaagttgagcagcgtcccatttttctcgatcagacttgctgatatgaacattagtgtcattcagatgattatcaaagtcacttttagtagcttgttttacattgtctacattcccaagcccaacctgttcagcagtaaccttgtgtgggtttgattgatcgttagtatgttcagctaaaaaagactttgacctttcatcggagctgttccaataactgcgctcgtcctttgtgatatgtcgatccaggtctgcatcatgagcgtcaaaatcaattttcgctgcttgctgtacattatcaaccttagataagccaacttggcttttagtaactgaatggggatttttcttgtcgtcaagatgtccatcaaaagccacctttgtggcttgctcttcattaagtacatttggtaatccgacttgctctttagttacatggtgcgggttttctatgttctgagtatgcgactttaattctgaattttgcttttccatgaactcatcgaccttatcggataaacgtttttcatgatcagacatgtgagattcagttctgaaaaattgatctttaaggttattgatttgtatattgttttgtttgagctgacctacaaatttactgctgctcattaactcaccgcaattcctttaaccgtaacatctccatttacggaaatgacctcaaccatgaatttgaaaagccccgcaatatcgaaatcccagttttcatttgtattcaatgtacccgtacctaattgaaaatcagttttgtttgttccagcaatttctgtcttttcgccattttcatctacagcaaagaattttatttctcttgaagttgaggaaccagagatcttaacagtaatatcccgataatgtgatactacaaattcttcaccttcagacggggcagttgttgcttcgtggaatgtaaaggttgctttatctggaatggtttttaaaatattttcatcggtttctgtcaacaactccacctcctaaatctgtttaaaaactgacttttatttaaaaaggagaggggaagaatcccctcaaattatttagcttcaaatactcttacgtctctgtcagtaccgtcattgatcacatagacataaagtgttttaccagcggcgacaggaactgaaaaaggtttgtcaccggctgttaatgggatacctgtatcagcagttacagttgagttcccaatgtaaatcgtgccttctgcaggtgggtaaatagtaagtgctgttctgtcagtgatacctgcggtaactttttgagctgttgaagtaacagtgaatttatccgttttaaaagaggagaaaccaggatctctttcattcaaggtcacggaaggggattgtacttggatgcctttgatagcatccaaaccagcttgaggaaagtcaacttgtagtggtttttcttgtgattttagatgaatatcggtgattggtttaccagttccatcgtctctagctgaagtgtaaatgtctccgtctttgtttaaaagtgccaagatatcaagctcctaacgttattttgtttcttgcgttgttccaatgtctacactgctattcgatgtcgcatcttcttgttcagttttaattccttttgtcccatcagggttacgcttaacacgggcaaaagtaccgatcttgccattatcatcagctaatgctcggtatccaatttcaggtgtgtaggcttgtccagcctctaaggacatgtctgcttcaccagagaaattaactttaggtaactggatataaaggtcactgtaaatttttgatgtctttggatcgtactcaagtgtgtggatttcgaagtaatagttctcggagaatttttcaccactaatttcaactgtttctgcatcaacttcaatttgatagtgagctgttacagcgttccctttagcagcaaacgtttcaggaacagtaattgttttgtctgaaacattaaattcttgttgatctccgtcttcatttgtaagtgagactttggataaaggagtatacgcgattttgattgtgccggtatcacttacagtaagactttcatcttcccatacagaaatcgtctcgttttcaatttttacaccttgctgcattgccataaaatcaagatcaaagaaagcattttttacgttgcctgaaacctctttgcttgagttgatgacatacaggtctctatttccccatccgccttttaaaaagtcttgttggacttgttgggagaactgagtcatttgtgttacagaagatgcaacaaccttgtggtcactaagtcttttggttagcaccttgccaacttcatggataactgtttgttttgccaagtgttttcctcctaatttaaaatgaaaaagagactgtgaatcagtctccgaataattgctctaaatttttagcatctgctgtactgaggtggtgtttttcttctctatacatatcaacatgactattccagtcaccgattttcacatcagttgatacagtggcaaataacgcagaagtgttataattcattatttcacccattctgtaatatgacaggtacaattgataaattgtcatatcggctacctcttgatatgtgtatccattaaatgcagccacacagctagcgatgtcctttaaatcattttgagaattttggagttttaattgattattcaaatcatgaaactcctgtaattcatcattctcaacaattttctcttcagtcaggcaatgcatctctaatatcaattttctaacattgttaaatgctctctgatcaataagatgtagtgattccttgtccacaaatactttgctaaacactttaaaataagcctggttaaattcgggtaagtaatcatgaacaattttgaagagactattcttcttcaattcgataattaaatcatttaatgaaccgtcattgttgatttttgaaaagtttctgatgatttccttcttgctcattttcatcatatttagctcgcttatgtactctgggtaatctcttaagtggataaagtttattgcaccgacttcagtattaataggccttcctaaaaagaaaaaatcctttaacacattcatttacttgctccgaaagtgaatatcaatttgtatcccaagtacccttcaggcgcatttgatatgagcaaccttgtatatttaacatttttaccgatgccagcaaaattttgattgaagagcatgtcacaaatacgatcagtaattttcaggttcctgaattcggtctcctcataagtgttaatgtgtgtataaacatcaatcatcaagtcttgatctagcagcatcacactttgggttgagggtttagggattccattgccgagataaacacaaagtctgcatattggttgatcggttaaatcatcagttttgggagcacgtttaattattgagcttaatattgatggggaatcatcaactggatcataataattttccaacgtctgaacatcagggagagaagaggagagagggtcatctttataatataaaagacgattcaattctgtatcattcataatagttctaaatacagttgtcatatgttcaaccatcatactcaatcgctatcacctccaactttctttttggctataagtctaattgttccggtgtctccatagaccttggaatagtctatatcatcaacacggaattcctcaccataaaaagaaagaaaaagacccttctttaatttttcatgttttaaaaaagggatggtgacatgtgcttgcccttcaggaatgtttatagccaattctgatccaattgttgaggttgttcgttctaatacacacgggatgtcaaccttctcaccaggcactttaatctttatcggtctccctgtaacttcatcaatctttccagaatcaataagtttgtcagaagatgttagactgattgatgaattgcaaagccgcatagtagcactgtcattcattttgttatcagtggggcgcgcattaactaaccagtaactaccgtcatacaaaatcaagtctccacgatttaataagcctaaaactgtaaggactttttttgtttcgctgtcctgagtggtttgaattatcacctgttctggcttaccattcaattcaatgtcgtaagtttcaggtgaatttgctaagatttctttgaaaatttcatacttgtttgaattaaactcttcgttttcccagccactcaaataatttgaagaagaggttagataccaatctatagacatctaatcacctcaatcaaagttattcactttcagtttgctcatttttttttcaatctcatcgacaagatcttcataggatctattaacctgagctttagtattagataaacctgtcaattgaacatctcttcctacaacgttgtttaattttaaggctctgtctcgatatctgaaagagaatcctttgtacataagcattcctaaaacttgaatttgtgatgaagtaaggggatatttaaatgtattggacttttcatcataaccaagttctgtcagttcggtttcgtattcaccaactgcgttaatgaaaaactgctgttcaaggccatcagggagaatttcatttgattgaaacattgagtggaaaacgttaattattttttcataaggagtcaagatttaacctcccttatgattgagtatcaaatttaaacccagtgtattcttcaatgaacttgatcttagcgtaatcattaatcttttcttttttagctacatcaaacagctgagctttttcagactcaagtaagatttccttttgaacattttcttcgaaggctttttgggttttgtatcccaagatttgtttaattcgttctacagtaacaatttcttgtttgtcgtctttatcttcggtctcaaaacctaagtgcacacgggtttctttgtcatcaatatagattttggcatgagtaccttgaccgtcagttccagtaaatagtgaggtattgtcatagacttgggattgcacttccccagctgtgatctgtctaattccattggccggcaatctgaagtcaccgtgagagtcaatctttcggaaatataaatcccatggacataaatttttaattgtaatctttttatctaaattaaaagacatgtaatccctccaaaaataaaaggagggacacagccctcctaaattttaaattgtttaaatttgtggtaattcatattttgtgtctctgatgagaccaatttgatgttcttgtcctttggctacaccagctccaatttccatatcaaaacgagtgatctcagttccagtgataatgtcgttaccattcatcgatgtgagtccgcctttttggaaaacttgaagaggagactttttaccttgaggaatgaagaagagaagtccttcaggaagatatgttttgaagttatcgccggctttatttaattcagttagattataagcattaggtaattctacaacagaagaacctttataagtgttaagtaatcctgttcttcggatttcatccataacagactgagggagtttagtgcttgaagcatctccggttacagcctggaaccctgcaaagtcatttaactgagaaacaacagaaaagtcaccaacaatagaaggttgtccaaatcggcgaatctttgtgataatatcgtctacagatgatttggtgataccttcagtttcagcaaagtatttaacacctgttgcatttttaattgcattgaacatttcatttactacatagtacatcgctttgttcatcatatctgtttgaacttgctccatgccttctgctactttatcgaggtttccactttgaatctcacgatagttaacagcatagccagaagaaatggtttgagttccaatcgggtattcgctccaagttgtagtagcgaacggtacgtcaccacgggaagcttggaattggcttcggatggattcatgcgcgtatgatgtcatcattggttgctgatcatagccgatagttctaaatgtgcccataaaatcaaatagcttaattgctgaaataagcttaggctcaatggcataacgcacaattgtgttgatctcggctttagctacagggttgcccataagagctttggaagctagttccttcacatgggtcatagcagcattggcttttgctccaaacttggaaagatcttgacctgttgcagctgcagaaaagatttctacaataggggacttagcattcaatttagcatttgcataatggtttgagtctttttgaacattgtttaattcaactgtaaacattaataattacctccagaatataattaagcctgtactgttaggtacaaaccttttccgccaaatgtatttttctctaagacttttagagatactttaaactctgcaacgtcatctccagctttaacccatttacctgatttgtctgcagcaggaaccaatacgtcatctttaacaagcgcatcataatcaactactacgtctgagctaagttcaattggcagtccttttaagtcagctaaattaaaagcaaggacatattcaccttttagaactttgaagtcttctttattgcgaatttcaggtttatcaataatgtttccaacaacatacacatcaccttttgcagttgaagatgcacctggagggaatgcgttaccagaagaatcgttagggattacgactagaccagggactaaatcgacactagccttgcaacgtggattatttcgtacttgtttataagcaccaattgttccgaatttgaacattgagtattcctcctaaattttataaaagtgttattttatcttaataaagatcatcaatagtcactgaactttgttgcccagaatcacgaacttctgaataaatatcgaaatttgtgctattagtctcagaggcttgcttctttgagcgttcagtgatgaaggatcgagcgattgctgagttgatttcagaaataatttcgtttttaagctcgacagaaggagacttagagaacatttcaattttctcttttgcgacatccttttcttcaggagaatattcctttaaagcttggttaagctctccttgcatcttttcggctaccgccttgtttttgaattcctttagggaattaagctcttcatctgccttggctttttcatccttagctttttgcgcttctttttcttttgcatcagccttagctttttcatcctttgcagctttaacagcggcattcagttcttcagttttttgctttaagtcctcagtaagtttctcaactttttgatttaattctccaatttctttattcttattatcaagtttgttgtttaactcaaggactacttcttcttgagattttggcattaaattatcctccttttttttactgtttaattcaagcaaaatggcagcgtcgtctgcagggtcaatacctaaaatggcatcacctgtaaagtcaaatttcataggtatacgtccttgctctttccagccaccttcatattcaattgcatctgaatcttctacagctgctatctcaaccgaggtctcagggaaatcgccatcaaacatttttgattttaaccattgaacaaatttaggatagcgctggttgtataggaagccttcagctattaacactctttttggctcaccattaacatcaatagtgtcaatgtaagcattggtagtcgtaccaaccactgcgctgttttcaaagagaggggtgccgtccttgacttctgttaaaccgtgtccgaatggctcactgttttcatcatccaagaattctgcgcaaattggcattaacttgattgattcaaggttagcgtttatgtatttctccagccaggtaataccgttcttgttgaactgagtattgttttcatggatttcgagaacgacccacttgatgtatgtttgaccactggtttttttctgattgttaatttctaaaatcgtgcttttcaaatactaatcacctcctctcaagagccagaaggcgttccgttactgttatttgtcttcgatttaatcgtgttttcatttttcggatcatcgatctcaggtgcgccggctgacttatcgttattcttactcattgtgaaagaggtcgcatgaacagggaacttttcatcaaaaccttcgtctttttcatattccattagggataagtaagcatcaggattccatccagtagcggctatccaagcaataaggcttcctcgaccacttgtataaaggtctttcatgttttggactttttctttcctgttaacgtgggtaagagggaggtagtaaacctcaatataagagcgaggatctttgatgatattggcgtttatcaccttgttaaactcactttgaatttgttctaaccaggagaatatttgggaagaaaccatctcgatattggtttgttgagaagaatagttaccgtcttgaccattgagagcagatcctgcaaatcctaaatttgtagtgattcgtttaatgagctcgtcttcacctttaaccttcaagaaatctacattagtttccaacttgtctaattttgttccagaggccaaagagaagaacttaacacctttaacgcttcctttagcaactaacgctttttttatattctcatgctgctgctcctgttgcttttgagataaggctgatttgcctttttgatcaccttcagggaaagtctgataaattaaagtgctgttgagctcatctaaaatgtttcgtttagtgtcaacaaagtattcatcataaaccatatcaataaatgcggataaaccgattgggcgtccccattgatcttcaatgtcgctacttcctttaacagcaatagtcttattgttatcaagaactaaccattttcgattttggtctttcttataacccctatagccttgtctgatttcttctggccatcgtctaagcttgagcgatctcccgttacttgtgaacttatcaaaataggagacatcaaaagctaactgataagaggaatttttccttccgataattttgcaataatcgagaggaagagggaggacggaacaattaaagtcgtcaatagcatttgattcagttattgatccgatctcattgtcacttagagtggtggggaaagaatcatccactacagaatcaaaataataaaagccagtgccatatttgctgagttttcctaatgcatccctgacagcacttttgtcgccgatttttcttaaagccagattgaacttttgtttgttcgatttgaaattagctactttacttgatcccaaaataactctgtctaaagtagggagggctaccatgtagtcaataacgtttctatacacaccatttgcgttataaagcaatttagaggcatccctaatctgtttattgtagacgttgtggtctttcagccatgatttaactttgtcgtaagaaataccgttaaataaatcattaaagaacaatgaatcaagcggcgctaaatttgtattaaactcatatgatgactgtggttcagatgtagtcattattcacctcctcaatttctaattaaaaaagaatccaaatgaatactcatcatcggattcttccttttctaaaaataaagctatgtaatacagcgcataagcaattgcactgtacctatccttatcaattctttttacaacttgctcaacagtgaaagaattctgtgtctttttaattctgaggtttgctacttcgtcaataaacaattgagtttgaatacatgctgcttcaatcattacatcatcagatatgcttttttggttcttgatgtcatcataggatttaagcaacttcaattttccggactcaacataatccaggaattgagtaataatgtcttggttaataccttgggattttaggttgtaaacgatttccggcgaatttgggacatctggcttttgatcagtgtttattgtggcccagcatccaagttcttcattggtctccggatccgtaacatcctctaataaccggtcgattaaaccgccaccgactccgtttccatcgacaataacagctttaactcttgagagagaagtatcttgatttcctccatagtttttgaaaactctttttaccatgattgattgttctttaaaactcaatccgtttggtggctctataatattgaccacttgaacttgcctaatgaggttattgctgtttctgattatcttcaaaacaacgatagctgttttattgtttgattcagccgcagagcgggctacgtctaccccgattacatattcatgtagcaagaagttcttatttttatctctaggacaagaaagttcagggtgggtaattgtccgagctttgatcaatttactgatattaatcaatgcgccgtcacttgcaccaatccagtcacaaaggtaattctgacggaagcgagttacattcccttgtcgcgctttattaataacagacattttttgacgaccaaagtgaataggaatgcgccaatctgatccgaatacaaaggatcctttaagatcaccagtttccttaaccatcgtaaggattttttcgtactcatctgagtttttatatcctgatgtggagaaccggttaatctgcccatttaattcagcaggatctatttcgccagtcatggttgtacgagggatgttaaaaatcggctcgatagcatcatcgtataaatctttatcaatcaaggcagattcctctaaggagccacgtcttctacgtaaacccttagatgattgggcgtttgccaggttatcgatgatcgccccgttttgaaattcaactcgaccactgtcttttgaaaagttttcactcttgatttcatctttaatggaagggtaaaaccttaaaatttcctcgtgcttttctttccaaattttcaccgctgattcctttgtagaagcggtaatggctaacgttacattaggaaagcaaatagctgtatggtatgcaaccatgatctgggtcaatgtattatgactaactaatccattacttacaaatgagttggttaaaggcatatatagatcataaacgtagttctcagagtcttctgtttcaattactttagtgtaatagtaattagaatcataaagctctactaaatggttgaattcatcgctatctttattatcaaaacgctcattttcacttaataatagtgataatttttcgtaagtaagatcattagatcctttaagaacatgataaaatttatctcttgttttacctttaggataaattgctataatgttatcttgctgataagggatgacatctttatttggattgcgatttttgttacatattgatataagtttttcttgctttcttgaacaactaaatccaatttcccgtaaaaaaagatcaatattctttgtagaaatattgatcttataatgataagtattaaattttttatttagatatttttttctgaaagaaataataccaaagtttaaaagtaacatttgaacttgtttactcattttttctgatgcagtgcaaaattgtacgcttttatttgtcacacatccatcggtatcaaatagaccttgtattgtttttgcaacaatatttttaggtgctttaagtataattttaggtatttccttaccaaaagcatctttttcttccagtcctaactgtctgaagaattctcgaatgagcttaccaaatacgataaaattaattctatctttttgcttaactgcaatacctaatacgttgttaaaataatctatataattatttaatatatcttcgtcttcatttgtaaaaagtattgaattgtttctagtcaagcaaccatcaccaagaagataaccaataattaatgctaattgttcatcaatgtattctggaatattgaatttgtttctttctacttgccatctgccttgattgctaaatccatttaagaaatcatcaaagcttacatttagctttgtttcacttccaaatacattattgtttcttgaaataggtaataaatctccaactttaatttcactagaatttttgtatcttagttttccatcttcacacattactaatactgggtgatttaaacttgcttccaagtcatagccatcttgagttttgattttcttcgttttcttgaatccgcttgatatgccggccatagaagtttccattagaccatatctgtttttcattgagattttatgtattgtttcaacttcagactcttttttttcgtaattgaatagttcgccaatttctactaatccattttcagtaaataaaactgtgtctcctgcaacacattttgatccgccacgtggaatacagaagtagttctgagggaagcgactgagtgttctcatcataactctttggtataaatccagctcaattccgccgacttcgggtttcaacatatcgtaaaaaatgtctggataaaaacgaataaatgaggtgaactcagcccatttggagatattcttgccaatgaagtttgaattgtcatctggattcagaggggtttcaaaagctgcgtcgtaaatatctgttctgttttttgtgtgcttcttgtttttcgaggtgaagtttttataactagccattaatcttcatcacctgtgtcataaagaggttctttgtacacattctccaagtctctgaaaacattgttgcgagcactctttagtttatcaatttcttcaggcgacaatccttttgatttgaagtcttcttcaagcatttcatcataaaaatggtaaatgtctttgtaatcgactttttccttatcttcgagccttctgtaataatttataatcgcccaaatgattagatcagcgtcatcatatggttgggctgctaaacgaggaagaaggggataatgcccaattctgtttcaacggcttcaaataattgagaaagtacatcgactccaccactgatatcgctcttacttaactgagatacattaatttttgcatctgtagctgcctttgaagctaatgaaccccattctttagcttcttttacatcacctttagcagttgctaattcctcttttacacggaaacgaatatatgaaagcaagccttcagtatgaagtgtggttttttctccgtaatttcgaataagtttattgtattttctttcaaactgacggtactcatcgggggtgtaaccaataccccatttatcaatcaggtcatctggaatttcagattggctaacaccagaattgtttgtaggcgtagattcctctataagtggcttctctggttgtctttcaaaaacactgtctttataaccagtaccgttaaactgcttcaatgaattagccattgtcatataagcactaaatgtatctgtttttctcttttcagcttgttcccaatacaacggatcaaatttaacatcgatctgctgtaagactgtatatattgactcaatattgctgtaatcaatgtttttcttcaagcaagtcttgcaaatagggacttttcctgttttctcatacagactacttcgtgaattatagaaccccgactctttgtccttttctttttgacaagcagcacagatcaatttttccttttctttagcttttcttggcattggttcacctccaaaattttggttcaaaaacacgttttataaaacgcccagcaatagagagggagtcgagatttctcaaatcatcactggacgttctaaaaaagtattttatttataagttaaggcaccgttttcggacaaaacaaccttggttccttttaaggtatcagcaagagcatccagcaaaccttttccaataccgtttgcatcaattattaacttactcggtcgtttgtctataataatggcttttatttgactagcctgatgtttaaacgttccatgctccactttcttagagatgtcctcaatacgggaattatttaaatcaataattaaaaaggttgtttcttctcttctaggattaattacagcaattctttcaggattgtagcccgtgctcaatgtgtagctagttccgtttaagggtttagtagagaatttgacgtctcggttcaattgttcacttttagtgtttttctcaaatcccaggcttttatgcagacttgtcagggcgtcttttaattccctgttacacagataaccactatcattaatttcttttagcagctttacatattcccaaagaattttagtttcttctttcaatcttcctcatcctcatctttataaaattaaagttttatattaattaacaatcaaatttactagagtgctcttactttcaggggacaggttgtcccactgcactgctaatatttctataaaatcgtttgcagacataggatcattccttttacttttcatttttaaagcgaattatgtatgtagcctcaatacctgcatcatcaaaaaccataaatttttgagaaggttttgtgccaaaccgaccttgcatagcataatcatccgcaccaacaagcgctccgtttactacaacggttgtgctgccgtactctttttcataattgtgatgaatatgaccaccgaatatgtaagaagggatgtagccaagtaattgaggtaatcgtgttacacactgatcaacacgatcgtagtgtccgtgcacaaacacgacttcctgattgttgattttagcggggatgaatccgtcttgctcaggttcaatggagatgttctctatgttctttaatctggcttcaagataccaattaatgaggtattcaaagttttctttaatccctacatcatttttagaaggggagaggcgaccgtgattacctgccacgttgtagaacttaacctcttgaaactcacttgccaacatcgctaaaacctcggcaagcgtttctgatacatatttaatttgttctacagcatcttcattggcctgaactcttgtagacacatgaataagacctccgattaaatcaccgagatttgctacatgcagtgtggaaacatgattctgcttaccatactcaatcactttgttggtgagatgttctacacgttcattaaagatttctttattgaatttatttatgcggttgtcgatttccattccgaagtgccaatcactgaatagagcgagtccatgtttttcagcaatagcaggtgatgggaaggtgaagcgaaggggtctttttgactctaaagatgcaatagcttgtacgacatcatctttaatttgttcaaaccgtgcttgattggcaatgaatttccgatattctcttttttgatctcgtgctttgattgtttgtttttcggattcaatgcgaatttcttcatgtttttgttgaacttctttgttcatattctttgagataaagtaatcgtgccagcgctcaaattgtttaaagtctttacgccatttgctttcatcatagttggttccctgatccttgtttaaaagggcagcaattgtttttgtgtcaatgtgataagtgtctttgtttttgaaaagtctgatatgataatcagtaaatgattcgtctttttctcgttgtaaaacagtatctaaaatagctgtcattcagtcaccacctactcattgatttgtggaagttcgtcttcttcggtaatagaaattttcactttccgaccgtcaaatgattttaaaatagaattcagatcataacgctcgatgtctgtttttgtttcttcttcaataatcccatcaatgtaagtatagttaccttttaaatttactgtatgaactttcttagccaaattaaattcctccaatatttgttttatttacgtacaataagctccttcggaagcccgatgatccgaaacatcggtaacgtccgaaaaggggatataaggagatgaaaatatgagtcggataggcgttggggaaacgcccgaaggagattattgaaaacttgcgtaccagaagtctcgtaaggacattccggctgatcagtaaagtaaaacgcaagcacaaaaagacctccgccgtagggtgcggaagcctcgttctgattgcgtctatacaccgagatcaggacgcatcccttactcgctcgcttctctgccggacaatgccggatgtatagttggcgctgttggcttttagcaagctgcgatagcttgacacgccgccttggctattcgtttattatgcggacgaggatttgcacctcgcatggacgaatttcaacaaccgttagccaaaccgactattaagtagcccgttgtctacctcacagcatcgtccttatgttcgtctaagcgtctacctattccgccaccgcatcgttaggttttaagacactcgattctaagattacctgcgcttgattatacgcttcctcataatcgccgctcttaaactcgtctaatttttcccggaattctctatgacgttttaagtaagcgtctttgtcgaatttaatacgtatcggcattttcgtcctcccttgaaaaatatacgaaattagcgtttttttacataatattcattaactcacgtaggtacgcaaaatcgacagggaatacgctgattacgggttcatcgttcgaaatctttgtaagtcgaaaataacaaaagacgccaaataacgtcttcagaaactccttgtacatcatggtacatgagcataaaaggctggttatcgctgtgcgaaatccagctggctccttctacacctggcagatgagctatgataacaaaaatacacgctttaagggacgtgttaaaattcctattacctttacatcttatatatcaagtttttatgttgcttgccaactgctcagtagagtctgagagccaagggaaaaataatttgagaaggaagaccctaataagccttctcaatggcattttaaatgctcttgtcgggttacacgccttattgagaaacaaagcgtctcaaacgctcgccatttattttgcacagttttctctgacccgtgtaaggaggtatgtgcatgggaaaggtaagtctccatacagaacattgaaggagatgaagtgaaataaagtgaacgtgttgctaagtgaaattgaaaaggcaagaccgaaaataatccttttctgtgaaatgggagcggtgatcaatcgcccaaaaaccatctcacttattttgcgaggggatgtaattacaaaaagcctcgctaacccggaaaaatttttatgtgaccgcataataagcatcaaagcttacaagggcattatttaaagggaagggagacgcatctaccttacctaagtgcaagccgaagcaatacaccgcaattaatattcaggctatatgccacccataataagaccctgatgggattcagtcgcaatttgcaataatgcgttaagtcttaccgacatttttagcccgataatagccatttacctgtctctttttagatacagacatgcgagttaacctcgaaccctcataagtgaccattatccgactaactacaatgaccagttgtagctgtaaagtcgaatttaatgcttttgttcgtatgaaagtgagaatagcaatgtttagaaaaagcttaatccacgatggggcaataccccgctaatatccacttatccaaaaccctggcatccaagacctcaaacaaatgaatattagcggagaactgatatcccacatatcagtaaacagcttattattgacgacacccccatgccatcaataaaagaactctaattaataaacctggagatgaatacatgaaaaaagaggggaggtcgacaatttcctccataacttctaactctgccacttttaggagcataagctctatgtgacaaaggcgtgcaggaagcctttcctgtcgtcctcagtaaattttattaagctttcactgcgtcttttagagctttagcagccttgaaggcaggtgcctttgtagctggaatatcaatttcctcacccgattgcggatttctccctttacgagctgcacgttcacgaacttcaaacgttccaactcctggaatcttgattgattcaccttttgttagtgcttcaatgatgacattaaatactgcttccactttaggtgcagcttctttcttagtaactcctaatttttctgcaacttctccaacaaattctgttttgttcatgttttaattcctcctagtgattttgtttatttttgtgttaaagtataattacggtatcgtttgtgcttcttttgaaaaaatgggagacgtactcacccttatatgtggaaattagctttctttctcccttatggcgattatctcaaaaagggctttcagaccagttatatcaagggttcaaggggattttttcgttaaactttttccggtaaaatcgctgtaccccttgggggagtaaggctcaatacactttctatttcgtcatttttttcttactgtattttttttgccttaatcgatggttctttttttcaatttccaatgcacatttattacaatattttgatttatttgagattgacttaaacatctttccacaactataacaagatttaaatctttttaaattattctgcatgttttccaatattagatcgccaaagcactcccataatgttgatttaaatttgcttttctttttatataaatgcttaaccaaaacatcagcaacagattgctcgtcattatagattttcagcaatctgtctttaatgaccttataaacataaagtttttgcccaggcttaatgtcttcatcattcatgagccatttcttgttctggtctaatcgtttatattcacgaataattgcatcgtccaatttaatatccctgttcttgagcaggaagcggtaatcaaattttcctgccactgctgcgaaattaattcggtcagaagggataatggagtctaacttatttactgtgctttcattaattaactcaacactatgttcttctttatcctttgcattgataaagaagtgaggcactttattttttatgtaatctttaattttttcatcaacatgatcaggacgggtcggcatgaataaggtttttgcaaaatcaatagtaaagttattttccatgcataaccatttgatcacatccagatttatattgtcgctgttccatatcttagtgatgttgttgctgtactccccgatattgatcccataagcaagagttagtgcttcatagatgttcctgctattaatcttttgtttctgggctacagacatttcataatacaacggaacgatgttttccatattacgcttggcaatattgacgattaactcatcagaaataattaaggccttatccccgtcattatcaaactgcagcaacttagatatcggatcatgaatgcttgtgtaaacacctggggtaatgaaccacttttcatatttctcatcttttttgttccacctaacaccatgctctctgaataggtgaggggagcggaggatgtcaatatacccttcatcatataaagaacaatggacatcatttcctgaaagcagtccttttggattctggatattcagaaataatttttcgcagaaagcatatagatcagggcataagtatgtataacgagcaccatcaacaagcaattttcctgatttggcatctttaatcatgcttttctttttatttttaataatttctttcgtgtgatcatcgttaagaagttctggatatagaagtaaagcgtcctgaagagctgtccgatgtttctttttctccgtagctccaagaactcttaacatggtttctttgtcagttcccaatgtggtaatctcttttacagtctttgagctcatttgaattaattcttcaccggagatatctgtaagtgtttggagcatttgataagtgagcttcccttcaacagaaggatcttcttcgttgagttttgcccctaagcatccatattttttataattgccttgatattcttcccacgatgaataatacttccacattttaaactggcttttagtgaagataatttgaacatcatctttcactacgtcccattccttgccgtatatatcagttactttaaaagctttgttttcctcagcaaatttgcgaaaatcaaacgggactaataaaccctttacccatgggagtctgaccatgaagcttttgctactcagagtggggagaatcattccgcagccatccgtatgctcaatgggaatgttcattgtttttcgtgtgatctcgtaggtatctcgatcaatatagtcaacgagactcgacacatcagtttctaagtcgtcgacaacaatggctttatcaatatcaatctcccaagggctactggcactgttagataaggccatatagctattccatttgttaatgctgctaccaccaagggagttaatcttttcaatactcaagccgcatgtcaaagcatcctgatacttatcgtaggtgctttttttaatgaaacatgacttctttgtacgaatttgaccggcactgctcgtgaaataaacgtatttttcattgttatgtaaaaatccctgatcaataatgtccttcaatacttcaaaatggtaagtctggacaaccatgatttcctctgaaagggtgttttctttaatccctaatgttcgggtcaacactgaatcaaataaagaaatcactttattgtcccttaagctgtcagttcgaagtgttcttatgtcattatgttcttcgaatgcagaatagaggcattctttaaggtatgtaattctttgtgaaatgtatttcttatgtttattatttacattgtctaatgtcttaagataatctctgtatctataagacttcaaaatcttattatgtaatgaattttctttgtcattataaaatgctgatgtgtccacgctgtatatgtgaacttgcttagacaatccgtctttttttcttttcaatcaatcctctccttactattttatttttactttaaatgtgcttaatattcgctattaagatattgatttactaaacttcgatatgtaaagctttgcttattaatctttccgtaccatttgtaatcctgataaaggtattcttcttcgggtgttgctgtaccatcgactacttttccctcaataaaccccattaaatgactaaataaatactgctttttcatcttacacctccatactattttatttttactcttaaaatgattaaaataaagaccacttcatgtggttgtgtctttattatatattttatttttactcttgtaaacataaaaatccaaagttaattggatttaatttcgattaattcaaaaagatcgtcaactttacaatttagaatatgtgccatcaataaaagattgtatgtactagggaggacggttgcaaatccctcgctgtcatttttacaccatctagatatacttgctctttcagcttttatttgctctgctaaccagcctttttcaatacctttgctgtttagaaatgaatccaacttacttttaaccctatattccatttaaatcatccttttgctgtttgaataaattttataaaatgactggtttacatacaagcagagtatgattatttgcattaagatacaaaaatatttgcatttaaatgcaaatagacaatataataatcgtatatcaaccaagatacttcagaatcatcagatattaaggaggggtcacatggatacttattttgcttctgtcattgacaacttaactcgaaatgatctgtatattctaggcttattgagcgatgaaggggctgatttaaagtttaaatcaattaggaagaaaaccattcaagctaaaactcaactaactgatgctacttttagaaagagcattgatcgtcttgaggccttgcagtttattattatagtgaaaaacagtaaagagcatacaatttttattactcaatatggtcaagaagctttgagatatcaattaaaaagggagagggtttaatgtttggatttattggagttggtcaggccggtggaagtatagcggatgaagcaatgaagagaggatttcattctgttgcaataaattattcactttcagaccttaattcattaatcaatattcaagataagcttcatctggtagggacagaaggagtaggtaaagacagaagcgtagcagcgaaacatatgaaaaataactgggagtcctctattgagttcataaagaacacaatggaaaagccttcagtacaagttattttcgtagttttctctgcagctggtggaaccggttcaggagtagcccctatattattagaattgttaaacgaatgtcttacacataaaacaatagttgctgtaccaatccttcctgacaataatgaggtattggttaaccagatgaatacactggagttacttgatgacttatctatgccagagacctgtgtcttacctttggataatcaaatggttttgagcaaatatgaagggaagatttctgaaagcagactatacaaggagacaaacaagatgttccttgatttaatcgaagtcttactcaattacacggacagaggatcaaagatcagtacattagacaggaaggatttaaatcagctttttgacacaccaggaatcatgactattgctcaaacagacctcaatgaatttacaattgagggtaagtattttgataagctgcatgaagatatacagaagtcgtggaacaattcgatatttactcctgttgagtttacaaatgtgatgagagctggtgtcattctggatgttcatgagtttttaacggagcatatatcgtataatgagctgtttaatgtctttgataacaagatgcccctagacttatttaaaggacattatgataaagggaatagggcaataaccatccttagtggattaacctggatcaatgagcggatgaagcagttagatgatctaattgaaagtggaaacactgaagttaaagaaacaactgtctataaagcgaagaatcgccgtagagaggatttattcaagccgaggaagctggagaacaaggaatcgaaaaagacctcgtatatggaggcactgaagagactaaaacgttaattttaaagggaagctgcctattatggtggcttttttattttgatttttaatgacccccgggtgatcgttagctataaaagtgcttatcgtaaatgaagatcagaaagggttatttagttgatatagcaatgttttagggctgtcaaaggggataataggtgttttgtgatcgtaaaacgtagacaggagagaggaaaagtggttgtttatttaaaaatctgatgaaaaaggggagaataaggggtggaaaaacattgatattataggcttttacgatagcgattacgatgtgaaaataggctgaaaaatgggaaagtgaaaaaataagtttggtgtggaaatggaagtgctaggggtacatttgttcctattttttggcctttagatgttaatataccccctatatattggtatttaattccctatataagatacgttatgtagggtttttatgatttaggtgataaatttgcacagctaacacaatttcaaatgaaaaacaatatatatttttgaaaaaataattaagcggtcaacttaaaagtgaatacccattcattaaaataatcgtgtatataacgaaaggaaacaaatcgaagtgttatctatacaattcctcatctaactacacacctattttatattcatccttaatgttcatcttttcccatcctcattacattgcatccaccataaactatcctcagcttacctaatcatctctatccgtttccttcaccatacatcatatatccatcctatacacactaagcacacatcatcagaagcattctaatccacctagaatcaattttaatttaatcatagtatcattggtatccaatccacatacacgccttatacagcctataaatagccatgaataatagtgccaaaataatttaaaaaaatccattttaagagtaaaaataaaatgactttgaaagggaaatgtgctataatagagttataggaaaggaggtgtacatagtgcttgagaaagtgggtataacaattgctttccttattcctatcacggttttaatcatcaactgtttaacgatagctgagaagattcaaaacctgatgaagaataagaaaagcaaaaagcgtacacgcaagcgcctccgtagcaagagacaacgcaaacgtatacgcagataacacgctaaaggggaattaatcccctttagtcactacccatattataacatggacaagcacattgtaaacatgaaacgattctcattatggtttacgaacataacatttgttgttttattcttgttgtttctgttcatcaaagattatttcagcagcggaatacagtcgctgattacggctatcttcatagtaacgtgtatcattgtcattttgtcatggatcatttattttactttacgtaagaggttaaataaataaagtttgtggttttctggatattgatttacaaaaaaagatcaaaaagatattgatcatttaaagtgatcatgatataataaagttacaagttaagaggaaaaatacaatgtatataggaggataagaatatgattacagaagatagaatttttgaaatagaagaggaagagacaattgagggatataaagttagacgtgtgaacatgtcagaattagaaatcattgatagagaaaaaattgtatttaagggggaagaggcagaagtagctgaacaccttaactcactactcttttaaatatccattttaaaactctagccgatgcttattagaggtgagcgggataggaaacgaatccttgagggtatacagtatctttccgcgaatgtagaaagtgaccaccgatacaatgataagaaattctctggtcttgaaagacgtattcatgatcttgaagaaagaatcaacaattgaatttcatacatgagaaggagcggtaaaacatttatccgttcctttatttttaatattaaagggggaagtctacacttattatgaataaaattaaaataattgattcggttatggggagcggtaaaacatctgcagcgattaacaaaatgaattctgctggtaaagaagaaacctttatattcatcacaccttatttaaatgaagttgagcgcataaagaaaagcataaagtccaaacaatttttcgaacctaaagtaaagaagaaaggtgataaaacacaatataagtttgaatcctttcacgaactcttatcacaaaataaaaacattgtggcaactcataacctttttaaaaacgcaaacgacgagacaaaggaacttatacttgcaggcaattacacactgatattagatgaagtcatggaagtagtggaacaattacaggtaaagaaacatgatctaacaacactgtttgattccaatctgatttatattgaaaacggttttgtcaaatggaatgaagaaaaaaaagactatgaaacacgatacgatgacattcgagatatggcgttaaataacaatctaatgtatttcaaagacaatatattgatttggaactttccagccgatgtattccagttattcaaggaagtttacatacttacatatatgtttgatgctcaaatacaaaaatattactacgatctgaacaacattaagtatcaaaagtacagttcagcttacatggatggacagtatagcttcattgatcaccgtcctgattatgaaaggagctttaaaaaagagttaagaaacaaaataaaaatatatgaaggaaatctaaacacaataggacaactggagttttcactgtcttctaattggtataaaaataaatcaccttacaccatcaaaaaggtgaagaacaatgtattcaattactttaataatattgttaagtcgtcaagtgatgaagctatgtggacgacttattcagaccataagaacagaataaagggcaatgggtatacaaaggggtttgtctcatgtaatgcacgtgctacaaacgagtttaagcataagaaacacttagcatatacaataaacagatatacgaatactgttctgtataattattttaaagaaaagtacagtattacaatagaccaggacgcatttgcattgtctgagttagtgcaatgggtatggaggtcagctattagggatggagaagaaataactttgtacataccttctctaagaatgaggaagctgctcacaaactggctcgatacctgataaagaggacaaacctcttaaacttaaaaaataagccagtcatatcaacggttttagagcctaagtcttaaggagaaccagaaaaataattaaataaaaaataataaattcgtccgtaaagtgcctttacggccgtctcgtttcagcaagctgaacctcgataataggattttctttatttagaataaaaataaaatatctattgattattttaagtgatcatgttaaaattaaatcaagtcaaaggattacatacatttaagataaaaataaaatagttataaagaatggagaggttgaaaatgacagctgttttaagaattaatgaagagttaaatggaattgaactatattttgatagtaaaccagaacaagaggttttaactcatcttaaatcaaacggttttcgatactctggattcaaaaaatgttggtggagcaaacggacagaaaaatcaatgcaggtcgctaatggtgttactaaacaagaagtctcatcttctaaaacaatcacaaaaaccaaaaagaaagctaatggtgtaaatatgagtctgtgggatgcaacacaatggagtgaattagaagtaaataaggaacaagaagtaaaagaaatggcaaaggaaataagaaagcatttaagacaacgtctcccacaatgcaaattctctgttactactgggggtagctattcacatagcactattaacatcacaatcaaatcaagtccttatgaaaaaggctcagcttatttgactgcgatttatgattattgcaacagtcttttaaacaattatcgccattgctacagcccagcagatccttacactgactatgctggaagctacaatttctatggtcgtgtttcattagattgggaatacacagtgacagagcaaacagaagaaattaaagaagatatgacactgtttgattcaaagatggaagaattcgaagaagccgagaaagcgagaaaagaaaaagaatttcaggaatatttaaaagaacaagaaatcaaaaatgctgaatataagagacggcaagaagaaaagaaacaagccgaaaatatctatagcagcattgtagtaaaacaactgaatgaagatcaagagtattttgttattgatgcacagtttgccaacttaaacaaaaatcaagcacttgatcaatataaagacgaggttgctaaaggtgactacagacttgaaaatgtgaaaattacaaaagaagtgcatttcaatactgaagaagctttaaacaacttttctaacttgcttttaaatgattttgattttcttgcggaaaccggtggaagttttacggaagacaacaggatcaactcaatgattgattattacaatatggacgatttagaaaagaacacagttaaatggaatttatatggcgtaggagtgtactacggcgggaaattgcaatttattgtagacgctcaaggccattcttatgcaagatacgttggtttagtggacaatgcaaaaattgaaaagtcaatttttgataaacaagcgataaaagaaggagaattagacgagttaaaatatcaagcgggaaaaatagaagatctttctagctcagtcattgaagaattaaatatatttgcaacctggaataatgaagactgggacaaatataaagctttactcaaagaaaaattgaaattgaataatttaaatttgagtaaaaaaattatccaacaagcagatacagaggaattgaaaatttctttatacagaattctccatgaagttgacagcattcaagaacaatttaaaaatgctgatcttgaaaaaggtgaaaaatatactctgttttacatatctgatcttggatctttaattactgaaaaaataacgtatgacagttgccagtcaactaaatatgctcaatatgataatgcagtgaagttgacatacaagcctgaaaataaaagaaatttatattaccgacacttctattcagaattattgatgttcaaagggtggcactcgctgcccgaaactgtgttgaataatgtagaggttaaaccagatgggactaaaataattcacagtaagtactactcgtgtgacaaaagacaatttgacgaggttctaaattacttaaataataaaagcttcaaacctctaatcaacacatataaacctagtctataaaataagaggggatgagaaaacatctcattccctaaaaagggagaacaaaaaatgtttaaagataatccggatttttatccgacaccaccacagttaatccgaaaaatgacatcaaaaatagaatggaagcatattaagtctgttttagagccgtcagcaggtaaaggggatttggtagaagctattcacaatcaattcaaatacaccaagaactatagagggaattcgaaatatgatattgattcaattgaacaagatgaaaacttaaggcacatccttgaggggaaaagttatagagtgatagcagacgattttctgacgtttaacacttacaagaagtatgatttgatttttatgaatccaccttttagcagcggtgttaaacatttattaaaggcgattgaattaattgaaaagcaacaaagatccggccaaattgtttgcttactaaatgccgaaacattaaaaaatccgtattcaaatgacaggaaatttcttatacgtaagctagaggaaataaatgcagaagttgaatacattcaaaacgctttttcgaactcagagcgaaacacagaagttgaaacagcaataatttacataagcattgaaaaacaagaatatagcagcgttctaatagaagaattgaaaaaagatgagtcacatagaattaatgaggattataaagcaacacagttggtggactttataaaaggaattgtagaacaattcaactatgaaatcaaagcgggtttaaaattaatcaatgaatacaacagtttgaaacccttaatgctgcatagtttcaatgatgacagtactccaatattgaagctgctaattgataagaataccgaagaaaatgacatagagaatgcatatataaaacaaattagggcgaagtattggaatacgttatttaacaatgatcaatttatggggctcttcacaagcaatctgaaacaaaagtatttggagcacgttgaggaattaaaagattatgacttttctttgttcaatatctatacattgagaattcagatgagcaaagagatgacgcagggcgtggaagatacaatacttaacctttttgaagaatttagccacaagcattactatgatgaatcatcaaaaaatgtgcacttatataatgggtggaaaacaaataaatcatataaaattaataaaaaaataattattccactaaacgggtattgtagttggctcggtcactatagtccaacagactacaaggtcttagaaaagttgaaagatatcgaaaaagttttcaattaccttgacaacgggttaacagaagacataaacatagatgaatctctaaaactggctaagcattacggtgaaacgaaaaaaatagaattaaagtacttctatgtaactttctataaaaaagggacatgtcacattgagtttaaagacaaggaaatgcttaagaagttcaatatttttggcagccaaaagaaaaactggcttcctccttcgtatggcaaggtaaaatatcaggatatgacggcagaagaaaaagacgtaataaatgattttgagggggcacaatcttacagtgatacggtaaataacgcttcttattatatactggatacatcgaagcttctcttgcttacatcataacaaaatacacactttaagaataaaaataaaataagtattgattatttaaaatagtcatgatatacttaaatcaagttaaaacaacagcgaaagcatacatattttaagggtaaaaataaaataaaatgcatattttaaacagaatggagacattaagatgagtacatatcaagtagatttcaatcaattcagaggaagtatggaaacaacatgcgacctatataatttagataacaatacaacgcttcaaaccagcctttaccgtaatactaatagcctttgcattgaatataaggtaattcagcgtgatgataattcaaatagttttgcggagtacgatacacttgcccgtggttacattgaagtacctttgacttacaatcaatttaagaagcctgtaaaaaaagtttatctaaataaaataattaacgcactagattttattattaatcaatatcttattatagaagatacttctcaagaaattaacgaacgagttcaaatgaaagtgagtgcaactaaaataaatgaggaagatcaatctgactttacgaatgaaacctctaattcaccaattgatcaaattaggatggaaagatgggacagggaatatgacgagggagttaaatatttctttgataaatacgggaataaacgtataggggatattatttatattgatacacagcaagagcttgagcatttagaacacatagactgtgataatgtgataaggatttttgtagacaaagagcatgaaaataaaattaaagctattgtacttaaagatataaacaaacattatcaaagaagtggataaaacaacaattttatacaggagatgatgaagtaatggcagtaatgaaagaagtgtcaatagaagaatatgatttatttagaaaatggtatttaaagtataccaatagcagagtcctaaaaacaaaacagagggcagggtttacggctgttcttgacaagaaaacaaaagaaactgtttgtagcgaaagtcatcttatggggaaaagtagatacttaattaaacaaaattattatgatttatatgcagaggaggatgcggagtaatggctaaatgtaatgattgtggtaatgaacgttttttctacctagaggtatcggtgggagccaaacagcttattgatacaacaggtggagctaggaacggaaagatttatgatgtagactattcagattcaggtatagacaatatcttcaataaaggtagttatatttgtaaaaaatgcgaatcgaaagacgtacatcatgaggatggcgaaggtgattataaactctataataaatctgaataaaacagcagtttaataggaaaggggaattatatgcgtgaattagaattattgctcttagtgatgtgggcagaaaatggtgttaacgaagtttataagtataaaaatagaatcaaggcattccgtgatccgttggttaatatcgagttgattaatgacttgagttgcggaggtatgtttgctgacattgacgacgttgcaaaccacaagaatgcttcgtcagtagattataaagtaagtatcgcaaccttagttgaaaatagaagataataagataaatattttattaagaggaatgcctgtctaaataaaaacaccatttaattcgaaacgcttctttatcatcgcaaagaaaaaatgtaaaatccacctattggcatgagttgtcaatgatattgagacgtcattggggggagaaatttgaaaaataaacttgaaaaattgcttcttgaaaagggtgtatgtgaatttcatattaaggaaatgaaggacaccaaaaatataagtgagtatccatatgaattgtattatgatgaagtcggaaacagcgaaaaactatatcgggatgtcccgttaaaaaaaattaagagtttaggattcaggggaaccagtggtgtgtcttggtttgatcacgcgtgttataacggtacagataatattgacattggccgatgtgaaaaagcttttgaatacttaaaaaaacaaagtctagaagaatttcacacttattatcaacactcaccagtgaaattggttcattatgaagatgatgacttttatgctgtttacggtgatggaacacaccgtacaatttgggccaagataacagaagctccaacaatttatgctcaggtaactagagcaagaaagaatccttccttatataaatcatacttaagatttaaagaattagaatcacagattaataggtattttaaggagaatgaccttagctggggagttaaaaaaagccaatactattcagaaatcctttacaaaggtatgccagtagcactctattctatagatccgccttactcatttaaccgatcttcctacagtctcaatgatcaaaagttggatacatggaataaggaattaaatgaatttatgattgagtttgaagaaagttttcgctataggaaaatctttcgcaatgttatgaaggttacgcccggaaaattagagcacaaacttttttcttttattgaaaatttaagtgaaagttggtctacagctaatggaaaggcaagaattataaaacaaggattcgatatgtattgcatcgataaaaaaatcatttaagttactttaaaatatgtacaacagcatgagggatgacgaagaaactaaaggagaagtgatgaaaaagttaataattttatgtttgggtattatcggggtatttcttatagttcagtgtagtaaatttaacaacaatacaaaagtttatgtggatactcaattagaggtaaatcacgatgatgaaaatgaaagaaaaagttattatgacaatgattcaagccaagaaagtgaagcacttaatgacaaatatttaaacaaagaagagaataaggaatatgacatttacgcatatgatttaaaaactagggaaattcaatcacgtaatggacaacgtgaatatgtttatggaggcaacgtgatctctagcactcaagccgaaaaatatggttatcatacaacaccaattactaaggaaggagataaaacaatcaaattttggaggaacgatgtaaagtttgttcctgaaaagggtgagattgtcctggttagatttcctaagggtaatcataaaacatttgttgatattgagcttatgtataagccaacaggagagcctaatggagaatggaattggtgaacaaaaacactactttattttaaaacgggaatcgggctgcctacataagaacagcccttgcagttagctcgcaatccttgttttgactggtttgtttttcttgatattacgtaatttaagagcgggtttttccactattctgtacgaaagaaatgcggatgcagcagtaacagcaattagggctatgatcagcgggtaatcagacaatgttttattaattccagtgtataagaagatgttgatgatcaccatgtgccatatgaaaatccccatacttatatcgtctaaccggttcagctgtcgcaatatcttcggcccattgtaaccaaaccagacgagtgcatagctcagaggtacgaaccataaaaagctccataaggtgctgtttattgaactgagatgcagaaggtcaagtttatagaataaaaataaaattaccgaagacaaaaataaaacgatatgctgcggtaacttgctccatgccttagcccagaagatgcccaaagtgaaataaaacatctgcggcaggaaagaatgtaagtacaggttaccgaacacactgccaggcgcgaactttaaaattatgaaagagactaacacactgaaagcggaaacagcaaaagagcaaagaatcatttttgggaatccgaaacgtttataaaaccaataaattgcgggtaacaccaggtaaaagctaatctgaacaggaattgtccaaagtgaatcgttaaggcgacctgtgccgatgtgatggaatatgtcagggaagtattgagggtataacacaaaattgctaagaagccatgtccagtactctttagtagtgaatactgttaatgaaagagctcctagaacaattaacaggatggtggagacgatagcataggtgtatatagcgggtgcgatcctaataattcggctccaataaaaatcggttacattattacctttaagctgagatctctcataagaagtaaaaagaaaaaatgcacttagaaaaaagaagattgatatgccggtgtgaaatattgctttgctctctggggtataaccaaagacagaaatatttagatctcttgtagcatgaccaatcaacacacaaagagcagcaaacagcctgataacaaagaaacagttagaatgttttacgttcattaaaagaacctctttcctataccatatggcgaataagcagtaaggctgcctataagcagtgatgattatatcataaaaatggaagatttgttcttaaaaatgaactaaaataaatatttttgttcttaataaggtatatttgtgtgatgtagggaggtatagatacttataaatacacgtagatattcatagatacatgtatatctagctatatcaaggagaatgcagataaattaagaagcctctgcctgttctttcacctttatttccaatatagtataatttggaaaagggggagagggaatgaaaaagctaatctttttggctgtgatttgcattggttttatattgagttttaacacaccaagtgctgaggcgaagcttacattagactacaaaaatgtggattttcacatgagtgaggattcagagagtttttcaatggcagattattttgatcggaattttgatcgcacttggctcttctacaaattcacaattaacaatgctgaagggtgtactctaaatatgaaaatcagtaggataactcttgctggctgggtatttccacgtagtgagaagcagtttgtagggaactatgctgactatactgctacagatcgagtagagggagatgctaatcgtaatcatgtgttagagattacaaagaatccaggctgcggagatgtgtggattaaaggtatttatggatttgaacatgaagattcatttgattggtaagcttgatacatagtcaaggtatatccttgaccttttttatggatataatgataatttaaagtgatcatacataatgaatgcgaggtagtaacattgattaaatcaaatttaaagccaatattagacgaaaggaatatcagtattcgaaagctgtccaatgatattgatcatggttttaacacagtcaggaagctgtatcatgatgaaatggagcggtacccaagggatctgttggataaagtctgtacatatttagacattgagctgcatgagctgttgatttacaaaaaagattaaaaagatattgatcacttaaagtgatcatggtatactaaagttacaagaacagtaaatacttacaaattttataggtctacataaaatcgtactttcatagggaaaagaggaaaagaaatgttgccaacttctttaaaagcaaaagttcagcgaattttattaaaaggtagctttaaaaaatctgagagctctaaaagcagagtaaaaggactaagcaatatttcagcgggtttcacttttgagaagatgtttgacgacggttactgcctctattatacatgcggtaatatgactttccggggaatgccaaacgaaaaaaaggataatcaaacagaaaaaatgtatcacttcttattggatcagggtcttcaaaaaaatattgaattgacagagtttggaaataaaaaagtaatcttgttgaaagtggaataattgcgagacactttgaggagtagcataaatttgcactttacaacaaagggagagataaaatgagagaggaaattcaagtgttacttgaagaaattgaagaattagaaatggctttaagtaagtccgataacaatactgtttctgtggttcttcaagaggcaattgataaaagacgcaatgaaattggcgaactaaagccaaatgggtacgtcatagcagacgtagtccttaaagacggtaccgagttaaaacggtgcttagtttttactgtaacagatcgactagggtcacaagctgtaactgaattagttgaagcaagagaaatcttcgaaaaagataaagcggtttatttgcaacaggaatatgaggatggaaactttgcaggggatataggagtacacgaaatagcaacatacaaccttgaatatgaaaatggtgttaatgaataaaatcattctttcatcttaattaataaaggagagtacataatgtatagattcatatcagagctgaatttagacgactcgacaattcaaaggatggataaatcccaaagctttaaatacatcggtggtttttatatgtatgatccccagcaaatcgaatggccaatcccagaaggagaatcatcttcgctcagtgatttagcccatttaagttttaattcttatgactgtgaaaaccaaatgatcgcggatatgaaaagggaattcactgaagaaaagttgttaaatatttttaattctgagtgtccagaaacagcttttaatgacgctgcttcaagaatcattgaaaaatataattaaggtgggttttaattggctagagataaagaatgggttaaaataagcgaactttctgaagaagaaaaacaaagcttgactgccggtactgcagttctgctgcatgataattactataatgggtcgtcagaaaaagcttccttgataagaaaaaaaggttctcaaggaagactagaagacaagtattacgaattgaacggtcaaatggttagaattcttttcggaagcagaatcttaaaagtcccttcttctttattatctgttccagttgcaatcgacagggaacaggaagtcgaactaaatctttcaccagtccaaattgttaaagttatgaagtcattagaactgttactagacttagacaaggaagaatttaaatttaatcgagaagagattgtcctattattggagcagctaagtaagaatctagatagtaatggtattgatcctaacagagtaatgaacgagctgttttcaaggattgattaagttgaaatgaaaccagtcttttaaccagttatgtaagtcaggttgagtcaggaatacttttttgaagggttagatatcaaatgacgatgctaatagcagttaaattcgacaatagcatagtaatgactgctgacaaaagagtgactactacaaatagcttgggccgaattttaaaagtggaatcagatgaatataagaaaataaaaattattaataagaagtacgtaatttcttttgcaggtagaatgtttattgcagaaaaagcttttgattttattgatcaaaaaagcgatattttgaacagtaatattgatccactcttattttttagagaagcttttaattacggaaaatcatgttttgaagcatattattctggtattaacccactttccgtattttttgttggatatattaaaccagacgaaagaccacaattgttggggttttcatcagatgataattaccttggattagaaatcgattcaagtattaaaattaattctaactcccctgatcacgaagacatgcttataagcgaaactgttaattttatttcaacagaaatgtcaaaccgtcatgcctatcatgcaaatgaaagacttttagagatttattcggaggcaataaaaagaaccaatgatccaatgatcggaaaaacaacttactctgttatcttaacttctacaggtgccgaagaataccatcattaatgtaaaacagcacgtaaaaattataattaagtgaggagaatgtaaatgatcaaggtttatacaagaggtcataagataccaaaaaagattaaatcttgcatctctgaatgggattattggtcttggattgtagttaccaatattgcaaagaggaacaaggatgcgaaacgactaatagagaagattgaaactgatccagacaggattgcagaatataaaactgaagatggaattgaagtttatgtaagctacatgattccagtgaaatagaaaagagcattaaactaaatgctcttcttcataccacatctacgacactcacgtaaaaacacaccacttttcactgaactcttgaataaagcgtaatcacagttgtcacagcgaccatatttaacatcgggatactccttataatcatatacaactgttacatcgtagccattagtctcaaaatctttctcttccattaaatttcacctacacaaagtatttaacactactataataccagacgatgtatataaggagggttttaatttgattggaatagcatatttcttaatgctctggcttggtgtaggctttctgacaggatttaaggccttatttgttgatcaggtttatgatgaagagtttaagcaggaactgattgattcattttcaccaggtatggagcagaatatgattgaactgttctttaagaataaaataaatatcatggtgttttacatattaattggattgctgccactggccataaaaattgctggtctgctgaagaggagttagctatgcctgttatcgataccttttttgttattcaatttgaaaatgatgattacttcaagtcatttaaattagatggaagtggttataagacatctaagggacttcatggcgcttctaagttcattacaatgtcagaagctttaatgatagcaaacgagctgcgtacagagtttaatgtcacttctgccattagacaaatcgaagttattactaggtgatggggtgttcaggtgtactggattgaatggattgaggatggggagaagaaaagtattgttgtggacggctgggttgaatgggccacaatcctggaagacctttatcagcagcggtttgagtatgttgaatggaagcggctttaaaagtgttgacagaaataaaaatacaactgatgagacataagaacctgaaaagttactaggggcatttttttggacagcagaagtaagatgagatatatgccaattgaagattttccaaagaaagcttataaatacatggaagcgaaatggttgaaaaaattaatgagggacaagaaactttttgtaaatcaccttaataactatccagagtcaagcttaggtgcggatgttggagatgaccaagaaggtgtagcaaacagacatttaaacattaaaaaatataaaacaggagaccataatccacaccttcacaatgaactacaagaatggtttcctgactcaatagttagacttgaagatgtgtcatttcaaacctcaataataaataaaaatttttatgtttattgtttaactttcaattatgataaaaatattatgagaaagtttggaggttcagtaatggtaattaatgattttccaagtttcgcatattgggtacacaataaaatgaaaaaaagaaattgtgccttatatgctgcgaataattgcatatatagagattcaaggagcattacttttaatgaggaaaacactgatttttatttggtgccaggccttattaaagatagtaagcattctgaacaagaagagtttagatttctttggaggaaaaacgataattctttaataaacagaccaattaatgatctttatgtaccagaagcattaaagttttgctcctttgaaattaatgaataaaactttatattgtttttatggtttacatactacgttcaattatacgtattgaatttgcaaactttttaaatgtatttataatcttctttaaggagttgatttaaatgaattgggtatcttacccctcaattttacactatgctaatgatggtattacagtaaccttcccagaccttcctggttgtataacttgtggagaaaatgatacagaagcaattagcatggctaaagaagctttaggtcttcatttatacgggttggaaatggacggagagaagtatcctagtccctcaccgttttcggaaattaagacaggggaaaacgaagttgtgtgtttgattgatgtgcctatgcatgcatttcgtgatgagtataggcgtaaatcaattaagaaaacattaactattccggcttggttaaatgaagtggctgaagaaaagaacattaatttttcccaggtgctgcaggatgcattaaaagataaactaggactaaatatctttaaggcacagtaaggattcttattgtgccggttcatataaaatacgaattttaaacagataagggttccttaaaaaataattagaataaaaataaaataaatacttgtaattctgacaactctaatgtatattataaacaaagggaacattagttgggaaggggtgtagtaaccaatgaatcttaagcagatgattaagaatgaatgtgaaaaagacaaccagctcgcagcgaaactctcaaaaatagcagggtacaaaaaggttaatggtttttacaaattcatcaacaccccagagaaagaaatggacaacttaggcggtttaattaatattgttaaaagcttgtttcctgataatgaggagcagcttctaagtgattacttcttatcactggatcccaacaaaaaatgtgccagacaatctgttgaatactcagatattaatcaatgggatacgttaacagacaagatagtgtcgaggctatctagctcaaaaaacctagcaagtcaagaatggggcaatatatacagtatacatagaagattgagcgaaagtaagataagtttaactgatgcaataagagcaaccggaaagtgcaaaacagatgaaatgttatttttctcaaatgctatgctgatgtatgagtatttgaaggtaggcgaatttggattgatgaaaagcacattatcacttctcaatttcaacgacttacccgaaggctttgtgaaagattgctatatgaatagaatttcattattaaatgcaaatatttatttaaatgataatgaaattgaaaaatctaggtattattcagaacaagttattcaaaattcaaatataaatcgactaaaagtatttgggcatctaacatatgggaacacattaatttttgaaagctactctaaagccaaagagcagtatcttaaaggattggaatttgctcgtgataatgaacatcataaatataagctgcgattagctctttgctttttaagcaacctatggaataaggataataaatggcttgacttcgacactgataatatccctgataagattgaggtagcatattactatactaataataaggaatttaataaagcagagaaagtaataaatgagcttgagaatatggaattgtacgaatatgattctgggattctagattacattaaggggattctataccaaaataagaattatttttatgaaagcactgcaaagttgaaaaaatctggtgataaattatttatcaatcttccattagcggagctaaggaaaatgggctgtgacgaaaaactacttgaattaatcatggtctaaaattgaaggggggtgaattaaatgaaaaatattattcttggaatagtaatcttgttagcaatggctgttggatttgttgccggacagcaatcaattgagacagcatcggtagaccatgtagaccagcctgtaaaagttgcatcaccaagccgcggggcttaacttcaaagataatacataacttggctagacgtttgatccactggatcaggcgtcttttctaattttaagagaatgttccagaaattcataatataaaaaacaagaacatgggggaattaaaatgaaaaagcatttcggacaagtactttcttatgaggatatggctaaggggtacatggaaatgggagatattaatttagaaatttcccaggaagataatcatcttgaaaatgaagcagaaatggttagatcaaaatataaagcaaaggtatcctaatgaagattaaagacaaatcagcagacattttaacacatacataggggatgtgttatttgtcttgaataaaaataaaataaattgttgcatattattctagcaacatatataatgaagttacaagatgaacgttgttgggagatgaaacaatggaaacaaccagtgccactcaaaaggaagagttgaagattacatcattaagacaatatcaatacataaaacaactaaagaacttcacacgagtcaatctccacctagaggatccagatgtgtttacacctaataatgtaactacaatgagaaaaaatcataaagaatacaacctcattaaagaacaaaaaaattctataaaatgtatttaaggagtaaaaataaaatgaataataaatattatacagaagaaaacaaggctaaagtttggaaaaagcatatgatcgttttaaagtttctagagcagcctgagatagcagtagcttataatgagttcctacgaagagaagcgacaagtgatgaatgggttgggttcgaagaggagctttatgaggaattgacggggatgccaattataaacgtctgtaaggacgagagggtaaatgtcctaaactgaattttattataggataaaaataaattaggtgtgataaaatgaatgcagacatcttaattaacgctcttaaagaatacgacatgttaaagcaaatggaaatctgtaacgccaatataatgctgctgagtaatattcaaggtgagaatgaatggattgttgcgtggaaagaatttgatcaatacttaatgaaaaaaatgatatgaggtgtcattatggaagctcaaaagaaagcgtcaacactaagggattattcaatatacaataacataaataggtggtttgatgaattagatttaagaaacagggatcgagaaactggagaaattgaaaagtctaatactagagccacgtatgaaaggcatataagagagtttttcaaccactatgctgccaaggatattgaatatttaactgagagtgacctggcgattaagaagagtgacctgtatgattatcgaacccatttggctaaaaataaaagcaactccaattcaacaattaacaataagattgccgcactgaaaagtatgattaagtaccttgaatctgaacatgagtgtgatgcatctgtatttaattttagacctcttccaacagaaaagaacccagcaggctcttttgaaggaatatctgaagctgatgaatttgctgaggcagcgtatgttactgagcgtcagaacagattaatgaaaaagatgtttattttgtttagtgcacgtactggtggacgtaaatcagaggtacttagagttgggtgggatgatattacttattcagaaaagcaccaatgctatctcgtcaactttaaaaaaactaagcaaaaaaaggctagaccagttgggatttccactgctttttatgaagagttattgctgttaaagcaagagtatggggaacatgagcttttatttcataagttaacagttgattcaatacaggatatgtggaatcgcgtatgtagagttatgggcattcccaaagaaagaaagataactccgcatagtttacgcaatactgcaacaaacttttcttacagcattaatggtgatattaaaaaagtggcagcgttctctggccacagcaatatcaatactttaaatgaccattatttagtcaatgaaagggattattctcaagatccaggggttttggttgatcaaaaagaagacatgtcctttttagatgatgttaccttagagcaatataaagaattctttttaaaatcagacatgtatatacagaataaacttaaaatgtttttgaacaagtgatacaaataatcatataaaagctttacttgcttatgaaaataatgataaatttaatatgattatgtgaggtgataatgtgtctgaagttttgttgacaacggataaactttataagttaaaaactgaaatagagaaaaatcttaatgatattaaaaatgatcccaatatggtgaaggaattaaaagccacaatggcggacaaatacaaggcactccctggttatatccaagaaattttaaataataatgataacaacgtacagcgtttaaacgaaaaagaagtgtacattgtttcaaaagagttgtattcaattcttgggacgcaagctttagatccgtcaaattattttccaaccagattggcaaaagagcttgaaggtgggagagtattcgccggtgaagaagtagttaagctcccctacaagtttaaaaatgtgattaaaattaaagaggataactatgtcacttccattactgccaaagaactgagtgagttatataatagctccatcctgcagtacaattacaacactcagcgagaaggaaagtacattaagggcagccttattcctgtacctaaaacaaaccctaaatcagttgatgagatcaaagaattgtttattaaaggcgatttaattgtatcaatgttaacttttaacgctcgtcttggaacatctgatggtgatgaagaagttgaatatgattcaagcgaccaaaccctcactgtaacacgaggaaccttattagatgctcttgatggatatcatcgaatttcaggtattgttaaggccattgctgaagtccctgaattagatcaaccattcattttaaatgtgctcaattacgatgaagaaaaggctaaggttcactttgctcaaatgaatacaattaacccagttgaaaaatccagaattgaagaattgggtcaaaaacggtattcttcaaccgttgtcgagcagctgaaatttaaaagtgaacttaaaaataaaataagcccacaaagtgaaattgctattgatagcaattttcttgtaacatattatactttatccgaagctatagacgatgtatttgagttgaaatctcgaaaagatgcgttgaaaattgcgaaatacttggtagacttttttgataaccttttttatgcattcccagacgaatttcttgaagatgatttatcgtccattagaaagcaatcatacattaatcataacgtaatgttttacggttatgtttatttggccaagaagatgaaggaaaacaatgtagaactaaacaagcttgaaaatatccttaatacgattgactttagtaaaagcggaagagtgtttgaagaattaggaagacaaaataatgagaatcaactaaagaatattatgaagaagaaacttaagcgaatgttttatgatgaaattgctgttgtttaaagcctaaaggagaatttaatatgagtgaaatatataatgctgaattgaaggaaaagtttttagagaaatacgaaagtgaagcaacaagaaaccattattggctaaggctaagggatttctcagctacagaaaaaatacttcaaaaagacatatttaatttttctttggaagagctgcgtacgttatttttagatttagatagcaaatctatagattcactaagaggagcaagagctgtaattggacaatacacaacctgggcaatggaaaatggcttggcaaacagtaacatcaacaaagtgtatcagatacaggatggtgacttaaagcagtttatagataaaaacaaaaaaacactattcaccaataaagaagtagaagagtatgttgattttatggttaatgatcaggataaagcgatgatacaggctatttatgaaggcatagatggctatcagcattcagagttactgaatttaacaggtgacgatttacttgatgataacaaggtaaagctgatagatgataaacacggtgtaagaataattactgtaagcgataaatgttatgagttgcttaagcgtgctaatgatcaaacaacttatcatcttagcaatggttcgccagatagtggtcttaaaaacaaatttgctacattagttaaaagcaaaaacatttttaggctaaaatacaagagttctaatcagagtatgaaagctgacaagtttttagttcaccgatcttttagccagtttcaaaaatttttagaagaacccttcttttcacctaagaaccttatcaactcaggaaagctcaacatggcgtatgagatatacaaagagaagggtgaattaaaagtacctgattataaaaaaataactcgacaatacgggtttctgaatgaagacgcggagtttaattcacaatcactgaggaaagtagtgaatatggataacttagaaaaatattgtatcaagtctgaagtaattgagactaattcttaatccctgttgcagggattatctttacataacttttagagtaaaaataaaacatgtgcggataaactcgtgatattttttcgaaaaatatcaggattttgttcacatttttcagaattcgacaaagttagacagagacaaatttgtacatatgcagtaaaatagttctataccctaaaaagggtacaaggaggttcgctaggccaaactccctagcgataaagtcaatgtttgattttccattcatagagatcttcaattgaacagttaagggcaatagcaatgattttcgctgtttttatattcatagaaggtctaaagccgtttgcatagtcacttaatctttgcgtactaatgcctgttcgctttgaaagttctcctaatgacattcctttactttcgaggagaatggaaatcaaacattgtccgatttcaacctcaagcatcggacaacctcctgttatagtattgcttatcatactatatcaattctttccaagtttttaaatgaaagaaaaaagatttgccactaactaggtaaaaggttataattaagtcaacaaaaagggaacataagttcggttaattactaccagagagagggaaacgtatgtcagaaaaggattattttattcaaggggagctgtgcattcctttttttggcaggataaaagccaagaatgaagaggaagcactcttgttcgcatatcaatcaattaaaaagaaattaagaaacaaaacagggaaaatggggtttcttcaaaaagatcaagaaaaatatgaggcactatttgatgtagacatcatgtgtacagaggatgctgaaataacaacctcttatgccgaagaaatagacgattcgtttgaaaatgaaggctataaatcttctcaactgttatcaataaaataaaagcacatacacatcttgtcagtcatcatgagacataaaaaattggtgactttttagtcagactggagcatacaatggattttaatcttgaaattgacttgaaagacattatgagatcagtttccatgagtgttggttctaagaacatacaaagtggagagtactacatagacattatctttaaaaacaatggggattgtttgaggattagaatggatcatgcttcagttttagaatttagagacaaaataaatgaaactctttggaaactggacggcatgaagacgtttatgaagacagcagctttacagtatgagtaaagctgatttttttaaaattatttagaataaaaataaaataagtatttacaacatatggttgaggttatataatcgaattagaattaggaaaggagatagctttaattattgattaatgaaccaactaataatcaaataagaaccatggttttaaagaaatatgcaaagctcttagcgtcatgtgaaaggtcattgcgcagcatagagaataacgaaataagaatggcaattggagacctagattttgttaaagacaatttagaggaaatacaatacatactccgtgatgttgtgaatcagcatgaatgtattaagagtaaaaataaaatttaagttttatagagattaagataagggggaataacatgggtgcattaatcgctaagcaaccgaatggacggtactgccgatttagttcagtggtagactgtccaacgcacataaatatgacgcgtgaagactatttaaataattttactgggacaacaaaaggaagggaagatgctgaagatacacttgcaaattatctccggccgtttcacgaagttataaagtggtacacaccgctgaacatgagcgaaaaagagtttgtggaggcgttaaaagaaatgtgtgacgaaaacccaaaggaggcgcgggaattgtgaacacagcatacagggtgtgggacggcgagcagatgcattattgggatgatgaagggttgagccttaccatcaaaaataacggtgattggactttgaaacgtttatacacagatgttttggttcccgttgtagacagcacgaatagaaacgcggctctcatgtggggcacagggttgaaggataaaaacgaaaaaatgatttacgagaaggacgtcataaagtttaaatctgtctattgcgaaaacaagattataaaagcagtggtcaagtttagagattctcttgggtcgtttgtattcaataggggagacgatcaagacttttggagaatggacgtatccctaagtgaaatcgaagtcatcggagacatttatcaaaatcctgagttattggagggcgcggagtgaatgctgaagtaaagcgtgttgaatataagctgtggtacgaagttaagtacggatggaagcatctcagtttcggcgccaatgatgataaaactgcattggaatacgcagaggaatacgcaaaaaataactacctcataaattataaggtggaaaaaataacgaatgagagattgttttggactgaggagggcgcggaatgagtaagaggtctaccctgttattaaggaatagtgtgaaagcaggacaaagagaaaaattcattacaaatggcattccctatgatgaacttgatacacaaatgatcaatttaattgatattttgaatttcatgattggattgaaaacacgccactgttgttttggacataaaccatatgaggaaattcaagtaatgtttgaagaagaagtaaatttaaaagaagatcaaattctagagttagcggaattagcagggagagaatggaaaggtcttcagttaagctttagcaaatgggcgagattttctccattgatgtttaattggtcattggtactatcgaaaagatttagagatccagaagatccaaataaaaaccgttagctaagatcagttgaagaattctttgagagctatgctgcaaagaagtgattaaaagatgcattttaaacaaataaaaatcagaaaggttgatagaatttgagaacattagtgttattaagaggctgcccaggagtggggaaatcaacttggatcaaagataatggacttgagcaatacacactttctgcggacaacattaggctactgtttcagtcacctgtgttaaacaaaagtggaaaatatgaaatctctccgaaacacgataacaaagtgtgggatttattaatgaaattgcttgaagacaggatggatcgcggcgaattcacaattgtcgatgcaactcattcaaaacaaagtatgatttcaagatataagccactagctcaaaaatatagataccgtgtacatgtagttgatttttctgatgttgatgttcggagaatcttaaaaagaaataaaatgagggctgaacataaacatgttcctgagagtagtattctaaatatttatgaaagaatgacaacagaaaaagtgccatcttgggtaactgttctaaaaccagatgagttcgaaaacacgatgacttataagccaagatgttttgacgattataaaaagatccatatttttggagatattcatggctgcaatactgtgcttcaagagtacttaaacggtgatttaaatgaaaatgaactatacatctttgtaggagatcttatcgacagaggtattgaaaatgcacagctgttagaattcatgatcaaaattaaagattataaaaatgtgattattctggaaggaaatcacgatagatatatcaatatgtatgggaatgatgaagaaacacctagcaccacatttaacaacaaaactaaacctgaaatcgaacaatccaacattgataaaaaagacattagacagttggccaggaagtttcatcagttagcttactttacatataaaaacactacatacattgtaactcatggaggagtttcaaccgtacctgaaaatctcttgatgaccgcaacaacacaattcatcaatggagttggagattattcagacgatattgattatgaatttgcaaataatactgcaggtcaaaatgttgtacagattcatggacatagaaacatgtaccgtctgcctgtgttagcagcagaaagatcatataacttagaagggcaagtggaaagaggaggtcatcttagagtcgttacactgtctgagaacggaattgaaacgcatgaagtgaagaataaagtctttaaacaaatttcaagtgaagtacagagtaacagtgcaactgttggaacaattgatgaattgatttcacacttacgtggtcatgaatatgtgcaagagaataagatgccaaacaatatctcttcatttaattttacaaagcaagcatttagaaagaaaaagtgggatgaaacaaatattaaggcaaggggattgtttattaatactgagagcaatgaaattgtaagcagaagctatgataagttctttaacattggggaacggtctgaaacaagaatgcatcatctcgtggatacaatgaagtttccagtaacagtcttcgataaggcgaatggatatttaggaactgtagggtatgactctttgtcagatcagttggtattcacttctaaatcctttacgtctcaattaacaagtgaacatgcaaaatgggttgaagatatgtttttcaagtcctttgatgaatttaaagtaaatatcattaaagattatctgaagctaaataatgtttcattcgtttttgaagtaacacttccagaaaaagatccgcatatcattgaatacagtaaagacaaactagtcctattagacatcgtaaaaaggcaaatgacgtatgaaaaactcccttatagtgaagtgaaggcagttgcagagagtctttccattgagtgcaaaaatcaagttgcagagtttagtaactggacagatttctatagatggtatctggacgtgtcacaagacttttcaattgaggaagagggttatgtaattgaagatgatgccggcttcatgacaaaacttaagctcccttactataacttttggaaacaaatgaggggattaaagcataagatcagcaacaaacatgagcatacggttaatacaggaagcctttacactcctttgcataatagattttttgcatgggctaagacaaaggacagaggatatctaaagtcaacctccattatcaagttgagaaatgattttgaaaaagaaactgtggtaatggaatccagatgaattcaagataaaagtaaaattttaaagagaaaggttgatgggaagatgaaatttgcaccaatggataaagttaaatttaaaacagctagccatttcaacaaacttcgaacatttaaaaaaagagttcctgaatttgacgatcctttactcggtgattgctgggaatttgaagaagatgggttaaaacaatttgattgggaggagaattacgaatttgtcgctaggcccaaacattttaattgggattaaaaataggatctaattgagtttttaatgaaaaggagctgttataaagtgaaagatatccgagttgtttatgacagaaacaaaactttagaagcggtcgttgtccagtttggagctatatgtgtgagctagtagaatcgcaattaattgatgaagaaactaaagaattcgacgtacttaatgatgaatatcaaggaatttggaaatatgaaaaagggcaacactgcgaagtcgaaatttatgatggggtagacaagtgggtttgtcaagcattattaaactgaataaaaagtaaaatgttcttcagatgatataaaggaggggaaataaagatgagggaatcacaattaagggaagaaaatgaaaatttgaaaaggcaagtagatcatatgaaagaagtctataaagaaaatatgcatcttcatatggcagtaagacaaggtgaacagttaaaagctaacctacaagcttatttacgacaagatgaccgagtatatagtccccatttcattacaccaaaacaaaaacaatatatcgcaaatttgttcaaaaaacatggcttgtctccactcagtaaagcaaaacgaaaaatagttaggcgttttaatgggggcggtctgctttcagagcacgaagcacatcaaattatacaaatgtatgaaagaaagtaatgttaatcttgacttggctggttcaactgtaaacaagaaggaaagagatttttaattgtagttatacagtcacaataaaaagactgttttaaagaaagggtgagaaccgatagtcactttcaaaaaacttagtgatcctgaatatattaagcagatggaaattgaaagaaatgaacgtgagcggatatatcaaaaaaaggagactttaagaaagaaaacggtgtgcttcactggtcataggccgaacaaattgggtggatacgatatgaaaaatccaacaatgcttaaactcaaagataagctgcttgaagtaattgaagaattaatcactaaggaaaacaagtccagtttcataactggtggagtgttaggaactgatcaggctgcttgctggtgtgtacatattctaaagaagaaatacccacatattaaaaacataattgcaacacctttcaaagaacaagataaagtgtggtctgaagaacaaaaaatgtggtacaaacgtatgcttgatgtggcagatgagattattaatgttgaagaattagataaatataaagttagtggagctgtaccaggtgagttttcaccggctaaaatgcaaaaacgaaatgaatacatgattgatcacagtgaagcaatagtagctgtttatgacggaagtataagtgggacaaggaactgtctgaattacgctaggaaaacatacttaggacatcaaatttggaggctgcatccgaaatgtgattttgaattggatataagctatacgcctgaatgaggagggatataacatgagtgaatttaaaattgtgaatttagatggagttaattggggatcgcataatgacgacacgttagatttcaaagaattgattacaggaggaacgattgcagtaggcgacgttgttaaagttgaaggacggggcgattgcccacttcctctaagggagaaccaactttgcataacatttaacaaagaaaatgagttgtttcttgaagaaccattcacccaagaagaatgcaaatcattattcggatcagattttagctactaagcaattactttaaaaggattatttcaatgaaatgaggtgggaatttgagtgagaactataaagatccgagacaagttgcgcttgagcttgtaaagaaagcaagtgatcagattcgctataccaatgatgatgaatttacatttgaagtggttgataaattggaggaaattgaggatatgcttaagaaagatattgataaagaaaagaagaattcattgaaaaattagttgaaaggatgtcgttagcataggatacatcaaatacataattgatacagcctggtttaacttagtttggtttaagtggcatcttggagcggatataagcatatttgatggctgcggatggaatacatataaatatttaaagggtaaaaataaaataagtggaggttataaagatgataaagaggaatctgcttagcaaccacgttgatgagattattggtgaatattacgctgctaaaggatattcagtccatagcattgaccgccaggaaaatggacaactgatcgttgttacagagcgagtagcagaggagaaggaaccggcacaagtcgatattgcgtttgattttgtacatagaagaccacataagaagaagtatttagcttaaaaacggcaaagagtcaaagctctttaccatcaggtgatttctttaaccgattcgcaatgtacttcattacgtttactgcaatcgacactaatgcaataatcaatgctatttcaaataagaggatgtatccaaaattcacattaagcttttcaaagtaatcgctggtaatagagaggattttataaatccctagcataaaaacaataaaggaaacacctaaaattacaagtgactttatagaataatctttagtatgttcaaaattatagataattattgatacaaataacaaacccgtagcaatcttttgggttagcgaatcatcggccgaaaatgattgcactactatgctgatgattaatccagcaataccgattgttttattcaaggaatcacccactcgtatgtaagttaggtatgagtttaccaattaaaggggattttctcaaggcaatacacattaaagttaaattaaaatgctttttaagaaaggggtggaaacatgcttggttatcagaaagggcagcaagtaagatggcatgaaaatggggaaatgggaattatattgtgggtgacaaatcaaggctctgtaggtgttaaatggagctcgggtgaatacggtgaatacaattataaagttgatgagttattactgttaacagattagtatcttacccaaaagtgtgaacgcatgacagcaagaaaaaggtttagtctacataaaatcgtgattttaaacagaataggaggaaacgaatgaatcaagatattcagtttttaaaagaacttcagcaagagttgaaaaatcaagacaacgacggacaagctgcaccacgtttctggacagttggtgattatgaatgggtcgaagctcgagaggaaaatgcagaacggtattctgtatacctgccatatattgcagaagcatatgttttagatgattatttggaagatttaaaagaagatagtgagctatctaaggaagcattaacagagttgaaaaatgacgactttgatgatcctattgagtggattcaaaaatacattgatgaagaagcagaattaattccagaaagaaaggttcatattgtacggccggatacaatgtttttgaccaaagaagaagcgaagagccacatcaatttgaacaagcatcactacacttcagaagctcatacttatgcaatgacagcttggagggcaccaaaagtagagcagttgcttaacatacttgaaacgtttgattggaattcaattaaagacagtcaatacaatctataaggggtgggaaaatgaatacatatgtagttacaaaagaaactgaaaattatctatatgaaataaataaacaaattgtttatgccggtaataataaagatgctgcctttggtcataaacctgaaacaagtgagagcagactaattttagacgtctggtttaatggcctaattgttaaatcattcagcagaaatcctaatggaaactggcgcgttttatttgataaaatggcaatcgcgaagaaagaagttgaagactacagcagaaaattaaacaaggcacaagagcttgtagagatgatagagagagctgaacaagtctagataaaagataatttttaatcagttattaggaggaaacgaaatgaacgtaaatattaaacggttatcaccggacgcacagattccggcttatgcgcacgcaacggacgccggcttcgatttagtggcgtcagaggacgttattatcgaaccgggctgggcagagcttgtgccgacgggtttggcgttcgagattccggagggatacgaaatgcaaatccgtccgcgatcaggcattacgctgaatactagactgcgtgtgcaactcggaacagttgattcgggctatcgaggagaggtcggagtaatcgtcgacaatataaatcgttatacagatattgaaaaggactttcttttcgatatcagagataaaatcgtcagtgctctcgattacctcggagcttgggatcattttgcgaaaggttcgtacatcatccgaaaaggcgatcgcatcgcgcaagccgttatcaagccggtcgagcaggtggtatttacggaagtcattacgctcggcgatagcgatcagaatacgagtcagttaatttaaagtctgaatcgacgcttttcctcaaagtcttcgggatactcattctgctttgacttggacttgaatacaaaccaaattatagcacctagtgaataatccatgactttatcaaaaatccaagttgtgaagagatccataagaattttcattgcatttcacctcccgagacaaaaatgtcctatctctcttagatggcatgtgtatgacacgcatctattaataaaagagtgaaaagtaatatgaaaatcaaaaaagaattgaaaaaaataaaaaagaggtgaaaaaatgatcaaacaagaacgagaagattatataagcaggcttgatgaatatggattgacagaagaaggggatgagggaatgacgaatattttgaatgattttgtaggctatgacatttggtgattatttatgaataaaaataaaatagttatttatagaagggaagggcgcagatggcaacagcagagcaattgaaacgaatgaacgacataaacgatttgatcaagcttatcgcaagtattgatagatgtactttctactgtaagtcaaagaatcggatagcgtatttcagatttaagaaaaaactgttcttcgttgatgattacacgggcgctgacgtttacccatatgaattgggatacgggcgtgcaaatggtttttcgcatgggggcaacatgtggcaactagtcaacagcttcagaaaattcatcataacagggaaatacggcgagctgagggattataaagaaatatgggcttacagctatgaaggttgtatgaaaatccgtcagaaggcgaaggagatcggtttcattgaaagtgttgattacccctacagctttgctgaatgggcaagttaaactaattgattcatgtactaaattttcatcaaaattaattaactttgagctaaggaattatgtaacggagagattagactctccaggattcaaaggaaggtatgcggagtttaccatgcttagtcttaaatctgtgcttaaccttacataagatcggttctacaaatatatattcgtcagtttcagactttacatgtttcatagagtggaatttacttcgttctgcgttcggcatgaattccattattccggctgcagtaccatcaggataagacagaagaaattttatatcctctttggtgtagccggtgataagcacatctgtgtaatcataattaatcactttcagccagctatgggaacgtttattgatttcataaggggagttagctttctttagtacgattccttcaagatgcttttctttggccagattaaagtaagctaatccgtttccttgtagaccttcgattacaaatacattatcatggtcaaggtttaggtctgaaagcatactcttacgttcagtgagtggcttagtagcgattgaatgaccatcaatataaactacatcgaatacacagtaaaccaccttatgagctgatttcttagacataaagcgttccataacagcttcgaaatctggagcaccgcctggggcagctacaatgatttcaccatctaaaacagttccattgggtatattaagatctaacagttctgggaacttgcttgttacttcgttgttgtgacgagtataaagctttatctgatcattaaacttggagaggatcagtctaattccatcaaacttcagctcggtaatataatcatcgtcatcaaatggttctttgattgaatgcaataacattggcgatacaaacaaaatatcacctcctacttagaacataatagctaagcgaaggtgatatataaagcaaaatgactgtggtacttaatgggattcaatcagttccggtgagttgtttttaggcgagttaactaaggatgaaacttgataagcttccatgtcatcagcatcatacggaagcagtaagctttgaagataatcaggatcggtgtttttggggtttagccattccttttcgttcttgtcagtaagaatgaccggcatccgatcatggatgtcctccatcaactcattgggttttgtagtaatgattgtgcaggtatatagcggattgccttctggcgtattccacttttcatataagccggcaaatgcaaagaggttggatgatttaagtttaatcctcataggaaccttagtctttgggtcaagacgcttccattcataaaaactgtccgcagggatgatgcaacgtttgctaacaagcggttttctgaagcaaagtttctcggccaatgtttcagctcgagcattgatcattttatagccgatcttttcatctttagcccaaggagggataagaccccatcttagcttacccagacggttgtttgatccatcattaatgattgtcaggatgttctgtgaaggagctacattataacttggatggtatgcgtcttcagacaaaaattgatctatattgaactgttcgatgatgtcgtcaaactcagaaaataaagtgaacctgccacacatgttcatcatcctttagggttttttgaatattgtacaggcttgatacacgaaaatcaaaaaggaggaatgtgatgcagcggcaaacagttgaggtaaaagaagttgtagtgttgatcagagggatatggacaaagaagaagttcacggatattgaaaaggggcaaacctttaagattgtggagaatggaagagtaaagaaatacatagcaagaacagatccttattgggatgagatgtacgaagcctacataattgatttatttgataaaaataaaataagtggatgtgagaataatggcgatcaatttaaagattagaaagaacaaagcagataagccaaaggtgaaagatttagaggacgggtacttcattaaaatagatgatgctgatgtatacattgttagaacactagacagagagtatgccgctaaagataaacatgaagttattcttatcgatctgagcaccttgcaaatagcgccatacaaggatatgaaggaattaaaaagtaggctgtctaacagaggtagcacagttgaagttatcagacctaaacaagcaaacgttaatatcggttttgagtggagacaataaaaggaggtggagagaatgagagatattaaatttcaggcgttggtagttaaacatacattaagcaatttgggttctaatatgcattgggcaggtatagacagttacgaagaaattattgatgttcatgacatttcttttgataacggaaaaatagattacgttacagataaagacggtgatgaattttcgtttgctgataaaagtttgaaatcggttcgacaatacaccggattgaaggacaataacggcaaggagatttatgaaggggatataattcggattactttcgacaccacatgggctgaagaaccttattacgttggagaagttaaattcttggatagcgaaaactatccagcatttgatttaaggccttggattgattgtgagatgaatgctttgagttggttaaaaagcgaatcagacccgactgtcatcagttatgaagtaatcggtaatatttacgaagatactgagcttttcgaatctaaataaaacagagattttataaggataaaaataaaattaaaaaggggaaatttgatgaagctaattggtattaaaacaagtaactgttttttggtgtctgacaatattgaaggaaagaaatattttcatagtcaattagatgaattgtttttcgatgggaaacgagcaactgaaacgtataaatcagactggtttaagcttgataaggagccaagtgttattgaaaaacaaatgcctgctaaaaaaatcaatcataggtatgaattaaaagaggggttccaggaaactgatttgacgccacaagtaattaaaacttcttacataggtgaagacagtgaatactatgaagtgaagggtctatataatttaaaatttgaagaagtcccgcaacagaatcaaaaaattgagtttgaaatgaatgtaattgaagaaattgacggagaacttaagttgcaaagccataattttaacttgaattataacttactggatagaattcaaactcatccaatgcttcttgaaacaaagccgtgttacttgtcccgagaagaaagctataagattatcagaaaccatataaaagccaatataaaccctaagtttgcaagaatcacgagtgattatgatttctgtttaactgtggtcaaagttttggagctttgcaaacctcaagagtacgtagttgatctaaatacaatgtacaaacgtagaaagcctaaacttgagaaaagatttcaaacaaagcgggaagttgaaatttacaatgttgcacctaaagcctatcagagctacccaattgtagaaccgtttagtggcaaagatgttgaggatttaaagggcaatattaagaaatttctagatgatctaatggataaaattaatgagcctttagtcgaatgtaaatgctgcgaaggaagaggggttatcttaagtgaaaattaaattggacaaagattacatggtaaatgaattgcggctgcctgaatcctcaattttagaagaaatcactgatacgtctaggtggagtattcattatcgtattgtgtttgcatatcaagacaagttttatgagacaacttacagggaaggcgctacagagttacaagaggagagaccatgggaatacgatgaccaggttgagtgttttgaagttgagcttaaggaagttaaggttagaaaatgggtaagaaaagaatctaaataataaatggaggcggaagaatgagagaaatcaagtttcgaggaatgggcatcaacggagaatggtattacggcaatttatcaatcattaagcaaagaatcaagagtatgggtattgatcctggttcttatatctctaataaagctggtgttccatttgcttacagtgtcaggccggaaacagttgggcaatacaccggattaaaagacaaaaacggccgagagatttatgagggggatattttaaaaagaacagtcacggttgtcatgtacggttcaggcaaaccacctaaagatattgatgaatacttagaagttgagtatcgggaagattatgcgggcttctatatcggagaaaggccactgtttgcttatgtggacaatactcgtgatgtcgatactggctgcagatgcagcaaagcagaagtcatcggcaacatttacgaagatcctgagcttatagagtctaaataaaaacgatatttaaccagatagggagatgtttaaatgacttcagaagaagcaagaaattattttgtgcaaaagggacttagttatgaagacattacggagggagatatttgtgctttagttatgctactcaataagcatgttaaacaggcagttaaagcacatacaatgtctgttgatacaatgagaatgagtcagaaaataaaaagcaaatacaaaacaaatggaactttaaaaagttgttatctttacataaacagtcactattttactcaaagagaagcaattagttttaatccagatggttttattggtttcgcagggtgggcagattcaggcaatagacaacctataattagtgcttttactgaatgggttgattatatgagtgaacagttaagacaaatcagttaaaagtaattttttatttaagggggtgataacgatgtgatcgatttatatgatttgagttttaaaaataaaacaaaaataaaaaggagtggttattaattgttgaggattaaaaacaaaatagaggaattgctaaaaaagactaaaggagcagaaaagagagactttggacggtacactctaatctgcacacttcgcaaggttacgaagctattaaagtatatcacagaaaagaagtcttttccagtattggtgacagcattggtttcgttcatgaatccaatcagtatcttagcagcggacaagtatcggaactttgaagagcttaaagcgaatgaatcaccgttcaattttagcgtgttctcaaaagagcaagacactgatgtattaattcttgctccccatggaggtggcatagaagggggaacaagcgagcttgcaaaggaattaagcgaaacatactctacatatctttttgaagctttaaagacaccaggagcctttgatttgcatttaaccagtacgaattttgatgaaccacaagcacttgaaatgttgaaggggcatgagttcacattgtcacttcacggttatgcaagtaatgatcaacatgttctagttggcggcacagaccgggacaaagctgaagcgataacaagtacattaaataatgccggctactctgcagagcttctagatgagggtacgaggctatccggtagcagtccaaataacgtggccaataaaaataaaacaggaaagagcattcaactggaattgagcactggactacgcaaatcaatgttcaacaccttttctctgaaaggacgctctggtacaagaaatgagactttttataacttcattgacactctatcagggtttctcaatgaaaatgtagaagggaagggtttgacaacatgaacatgcaacagcccttatactattttgttgatgctctggattggggaattgatgataaagggtcaaatgcaattgaaacaacagaaggattaaaccgagctttagagtatgcatgctcaaaatcattctataaagtatatgttccaaaaggtatctacctaattgatgcagtgaatacgtcaaagcggttacctgaattcggtggaggtatcaatgttccttcgaatattgagctaatacttcatccagaggctatatttaaagtgcagccaaatgattatcagggttactcctgtttttatatcggccaagcaagtaatgttacgattcgtggcggtcaaattattggggatcgacatgagcatgattattcaaaaattacctcaattaagaagacgcatgaatggggctttggtatccatgttaatggaagtagcaatgtgctaattgaaaatgtacaagtttctgactgtattggagacaacatttggatagcggctgatggaatgatgaacacttcaggaacatatacgccttcaaagaatgtaaccgttcgaaagtgtacgcttttaagaggaagaagaaataatctggctaccaatggttgtgaaggtcttcttgtcgatgactgtgatatagaggaagctggaggagatacaattgggccacaattaggaattgatttagagggctttggagaaaacggaattaaatacgatcacccgtataaattaactgtgcgaaactgcagatttaaaaacaatggacgtggatctgttacagctcacacaagcggcaaggtaattattgaaggaaactacagcgaccatgttatttcctatggatatagcacggatgtcagtatcaaaaataacaagatcatcaatgaaaatgaaattaagacttatggaattgactcggtaggtgtttcaagtactgagtctggaaacagagttcaaattgatggcaatacgattagtggctttgaagtgggcatttgtgtaagaggaaagggtggcacagtatcaaataatacttttgaaaaaataaaagcatgccctattgcaacacatcaagcagaggactttttaattacggacaacaggatagaaaacagtgattgtgttcaagtccaggttagaaactcaaatgatattaaggttgtgaataccaaaggaaaaggaacgagctcgtcttatgctgcaaagataatggactctacccgaatcagtctcgttaataatgagtttgctaatgtatatggtggaatttattgcgaaaggtctcagtcagttcgtttaaagggaaatgacttgttgttaagtgggagtggatacggcatcttttgggataaagactcttctgtctcactgcatcgaaatgaaattcatgagcctaggaatgttgcaattaaaggcacccctgagaaatacagttgccagattagtgagaatcaggtttatttctgtaaatcattaatcgccatccaactgactggtggttcagaacatatattaaaggataatgagatcatgttcaatcgttcagcagaccaaggatatggtgtttatttggagaatacaaacaaggtacgtctcgtaagaaacgatgtgcgcggaattggtggcaagttattatcccacccatattgcacagataaagcaaagaatacaaccttaatttataacacatatgacagtggaacactgaagactgcagaaggagatattgtggtctaaataaaactgtagttttaacaagtttaggagatggatatatggccaatattttaaccaaagaacaagatgaagcaatccggtatttcaagaacaagctgaacatatctgaaaaactgtacatatccctgattaattttaatctgcttagagataaacacgaagactttggtaatagactatatgagctttataagacagacccttatctgtatatcagagcgcttaaagaaggttatgtggttgatcagccaattgaatttaatgaagcaattgtgcggttctatgatggtgaagaacttgctgtgatccataagactactgggaagagatacaatgtgaatgttaaaatgaaaaagcttcctgatgggtttacgctgcaaacaatgaacatgtggtcttggagtgaggttatttgattattcaaactcctttgtaaatggtataattgaattaataaaggagtggtattatgtccatcaattctattggaggctgagtcatgggagttagagtgggaggctaataagataaacattttgagttgctatttaagcggctcttcttttatgaggtattctaaaaaatatcgtcgataaaggagaaactgatgaatttcttaacagcaaaaaacgagtacggtgaaacggtttactttaaaactcttaatagaaggcctcgattgggtgattttgtgaaaccaatcgatacacgacctgtagacattgatggcaatagaattaaagaaagtggcaatagcgcaaataaatatgatgatctagatatcaactctttttatgaagtatacaggatatttaatgttaagcatgtaatcattaaagataaactcggtcataaagttcaattagattcaagtcaataccaattagcaaagaaaatcactaaagaggaatatacgaattttaatgaaaaacttcatttattaaaacatattgataacaaccttaaaaggattagcaacttttccagctaaataaaagcactttgtcgagctgcagatagtagctcaactctttttaaaacttttgagaataaaaataaaatagttattgaccgatccgttttggtgatgtaagattaagttatcccaaagagagaaaggaggaaagagatgaaaaaggaattaaagatactgaaagtatctgtcgaagccttacatacctacaaaaatgatgtcaaaaggaattacgacattgacgaagaccaagcaagaagaaagttaaccaggaatgtgatgttggtaaaggaatttaaaccaagaggaattaaaagaggtcttttttctaaaacatactcatatggaaacttaaagatcacaattcgacatggaacagtaataaggattgaaaatgtaaaaggtgatcctgaaccttgggactttccaaaaaagagatacatagaattaaacaagctacttggtatcaaggattgtaagtttagtagcaagtctcattataggcattttaagaataaaaataaaatataatattaacggaggcgttatattgagcaaactttataatacatttgaatttatcggtaacctatttatttcaaacaataaagagaaattccatgaaattaaggaatatgacagcggatgggttaaggaaagattaagcttcgcagttcaagagtcaaaaacaaacagtgtttttgttgagattgaaggtggttactcaaaaagcaaacaaaataaagtgttttcattcagcaagggtacagaaaatgaaaaaggatcaagactcgaaattccatgggaagatcggttgaaagaagaaacagtaaacatggttgctgatttttctaagatcctaattaacttaaacgatgagtcaacaaaaaccaaattaaatgaattgaagtttaaaattagagggttggaaatgaaagactctcttactgaagaagaaaataaaactttatctactctcaagggagaatataaacaattaaacataaacggtgcagaattcattcatgaatacgatgctattcagtacttatcccaaaatctcgaaaagcataaagacaataaatttaaaattacaggtaatattgaatacaattcatggaatggacggaattttagaaagttcaaaatcaaaaccattgaaattgtaagtagtgatacaccatctcaactaagagccacaatggatgtatttttcacaagtgaatctttagatgaatcgtcatttgaagaagaaaaaaggtactttgttgatgcatatgtgcttagctatgataatcaggcaaaaaaagatcgattttttcctcagcaattagtcattaatgcacaaaaattggactttgaaaatgatttacatatgaaacgattaaatctcttgaaaaacttctttaaagttgaaaatgatgaagtatatcaccttcaatgggttgtgaatattttcaggggtgctgatgagattgagtttaccgaagaggaactcacggaaagtcaaaaggaaatgattgctttaggtttaaacacactagatgactttaaacctaaaggagggctattgggcgaaaatcgtgaagaaaatagacttttaaaacctattttaaaaaagattaatgattctaatgattttacagaaggtgctgcaacatctacatatgaaattgaagatcttacatatattccacaacagattcaaaattctacaccacccgtagaaaaagaagaacctaaagtgactgaagaagaaaaagataatgcatttgatgatttatttgcttgatttgaaaagacctaactgacatttatttaaaaacaataaggagatgtttatccatatggcaagaaaatttggtaaaaagaataaaattaaagttaatcctctcgattataacactggaattattggtgaatcggggatcggtaaaacaactttagctaaagaagtttgcgaagaattagtcggagcagatgggtatataatcttgaatattggtaaagaggatggcatcgatgccatcccaaatgcctcctatgaagatgttcctgattggacaacctttaatgaaattactaaagatattattaaaaacagaacaacagattatgcagatttaaaggttttagtatatgacacatttgatgagttaattaaaattacagaaccagaagttattcgactacataataaagctaatcctgaaaaaagagtgaatacaattaaagcagcgtttggtggtttccaggcaggagaagacaaagttattgagttaattcttgagaagatgtgggaacttaaaaaggtcggtattagcatgtttattttaggtcatacgaagaaaagaacaatgacagacgtagttacgggtttggaatacgacatgctgacaaccaatatgacacataaatacttcaatgcgattaaaaccaagctgcacgttttaggagtagcatctattaatcggtcgattgaaaagaaaacagtaaaacaaaaaattgggcctgacaaaacagtgggaacagttgttgatgaatcaagaatcatcacttttagagatgacaactttaatattgattcaaagtcaagattctccgatatcacaccatcaattccattagatccgaatgaatttattaaagcaattgaacaagctatccatgtggcttttgataaacaaaaaaataatacaaataacattgaagaagaaagaaaagaacaagagcaaattaaagaaattcaaattcacaacgaagttaacaactcatcttttattgataaagaagagaatgagaggttggccgaagagattaagacactattccctaatgcaactgccgaagctaagggtgaaatgaagaaaattatggatcaatttaatatgaaagattttaaaggtgtagacattgtaccaactacagcattcgagaagatagtcgaagcattatctaactgaaggaaaagagggggagtctcccccttatcaataggagagggtattcttggccagaagatgtgtatgtcaaatatgtaaagctaatggaactgttgatacttttttcagggtttctgatgataaggggaaaaataaatactactgtactaaggatgaatatgaaacctatatcaatgataaggtgaaacgaaaaaacctcttaaactacatagcgaaagatgtcttgaattatagagagggtcaagtcattcctccaatttttctaaaaaagatagctgaactaaaaagattttatgattatgaagtgatacaaatttgctttgagaagaaccaacaaacaattcaatattggttaactaataaagagttttacaacgagtatgggatgattagctatatttttaagattgttgaaagtaacatcaatgatgtttataaggaatggctgcatgaacaaaatcagagaatgattgaaaaaaatcataatcttgatattgcaattgtaaatcaaactaatatcgttgattccacatctttaaaacaaaacaattcaccaaaaaatataacagagtttctggatggggaggacgagtattgaacaacttagattcttatccaaaggaattagttgaaaacaggggacaaattgaaggaagctttatattttgtttatggaaaaaccctgatttgtatgaggattataaagaccacgtgagggcggatagagattttctaacagaagacgggaaattttattactctctaggtttagaactgagcaacatgaattataagagctttgatgatgcgagtgttttcagctacatagaaggtaaagaaacattaaaaaatggttttattcggcgaggtggaatgaaaaccattgatgaactcaagcacgtactaaacgatgaaaatgttgagacatactatgatgaactaattaaatttaacatgatactaaagcttcatgataagggattcaatgtttcgaacgagcttgataaattcaagaagatgacgagtcaacaattgtacagttactttgaatttcaattagataatgtttttctaggtcgcggttcaggagtgaaaattgaggatcttgatttgaatgaagagtttgtcgaatcaattgaaaacggggaagaaatgggattaagctattcagctgcatgtccattattgaattatcacacgcttggacttcataaatctaatgttcaaatttttgctggatttagtgggacagggaaaacaagtttttgtgtttcttcttatatcatgtcaattttagatcagggtgaaaaggtaacaattatcgccaatgaaatgaataaaagggcttggcaacatatttttatggcaacaattttaagtcataaacttggttattatggtttgccaagaaagaaacaaaaaatgggcaacctaaagcatgagcaaaaggaaatgttacaaaaggcaattgaatattatgagaagcattacaaggggcgtatcaaatttgccaagatatatgattacagcattaatgatgtaaagagaataatgagaagaatggcaaaacaaggcttcggttatatgctttacgatacatttaaagctgaagatgcggcttcaaccaatgtaacaggtgagctaattgaagcctcaaaacagttattgcaagttgcggaaaaagaggatatttgcatcatcattacaatgcagttggccatttatatggagaatacgagatatctaacagcgtcttgtttatcaaatgccaaagcagttaaggagattgtttcagagttagttctaacaagacctttatgggaggatgaattcccaggaggaaaattcgatgttaaaccctatagattcaaaaaagactcgtcgggaaaatttacaaacattaaagaagaaattcagttagacccaaataagaagtatagattattctttttgaataagacacggaatgacgaaggcgatacagtgttgttataccaatttgacggtgcatggaataaatggaatgagctcggttattgtactcctaaacatcagagaactacagagcggacatgattaccaagggacggtgaaatcatggacgtatatgatcttaagaatcacattattgaaaagccagagtacatagtacttattttagaacagacggggttttacaatgttgatgaacgcgggaatgagtacagatgtgcgagaaaaaaaggaagaaatccgacttcagtaaaagtaaataaaaccactttaggtgcaacctgtttttcaaccaacttaaaaggtgacttgataacacttgttcaaaataaattgggtttatcttttcccaaaacaatcaaaaggatatctgaaatagttgattataaaagtgaagaagaatataaaccacctgagttaccattcggaggtttttataagaatataagaagactaagtaatccaatggatttggatctagaaacgtattccgatgacattttagatcaatttgtatctgttccaaataagttgttttatgaggatggaatattacctttaactcaatctttgttccaggttggttacgatagtgtttccggaagaataacggtgccatggaaatctcttagtggtgaattgtgtggtgtaatggggcgtcttaataagaaggaagttaatgatgaggaaacaaaatggctgcctattatttcatttcccaagtccaaaacgctatacgggtttgttgaaaattacagttcaattagagaaaagagcattgttatgatcggggaatccgaaaaacattcaatggccttagcaagtaagggattgaatgttggagtttctttaggaggcagctttttaagtgaaattcaagcaaatcacataaaatcaatgtttccgaaaaagtcattagtcatgatggatgaaggattaggtgaagaacatagcgtagaaattgccaacagcctaaagtttgaaaatttctttgaaaatgaagttgggtacatatttgatcgtgaaaacaagtatctgcctaagggatcaaaaatggcaccagcagaccttgataaaagcactctacaccgtctaatcagagactgtacagtttggatatgaaaaggagatgattgattgaaagaaacattaaatgaattgagacaacaagggaaaaacatttattccttttcaaagcttggaacctttaataactgtgaatatgaatactacaatacatacgttttgaaaaagaaaggcatagataatatttacacccttatgggttctgaattacataacggaattgaacagatttataaaaatgaattagacattggtgaatttaaaaagggatttgaaaatagattaattgaattagagctgaatggagtcaactttccgagtgactcaatcggagacagctggaaagcagacattggtcatttcctaaacaattttaataaaattgacagcaaaatggttttagagaagctgcttgtatttgaaatatcagatgggatttatcttcaaggatatgtagatgcaatccttcccagtgaaaaaggaaaaccatacgttagtatttatgactggaagacatcaagtaagtttgccggcaagaaattaaatgaagcaggaagacagctattgatgtacaagcttgcattggagcaaacaactgacttaaaagtagataaaatactatggttcatggtgaaatacgtttatgtatgtacccaaggaaaaaccaaagtgaaaaagaaaatgtgtaacagaggtaagtgggtaaaggaaatacgaatgaaactagaaaaagagatgcgcactttggagtatgatgatttcgaaattgacctattgttagataacgcagtaaaagaaaatagcattgactgcttacctgccgagattagaaataagtattggcttgaagattgtttagttgaatacgaagttactgaagagaaaattaatgaactgaaagattatattactggtactgttaaaaagattgaaaataaagaccgtgaagatgaaacccaatgggaaccagtgaaaatagataaatacaattccttttattgcagtgtcttatgtggtcaccgaaaaacatgcaagttttataaggattttttaaataaatcatcaaataaatttaagaaaaaggataagaccgatttgtttgataacctattttcttagggggtaatgatgaggaagatattctatgactttgaagtttttaaacataactggatggttgtgctgatcgattatgatactaaaaagggtaaggttattgtagatgatgttgatgaactgaaacgattctataagatgtttaaagatgatatttggattggttacaactctagaatgtacgaccaatacattttaaagggaatcctgttaggaatgaatccttattatattagttcaagaattattaatgataatgtaaagggatttaatgttgttagagaaggttataagatcccactgaataactttgacataacaactggtttccacagcttaaagcagctagaaggctttatgggttcaaggattaaggagtcatcagtaccatttgatatcgcaagagcattaacagaaaaagaaattaaggaagttgttgagtactgtattcacgatgtgaaacaaacaattgaagtgtttgataataaaaaagaggaattcgaaagtcaattggctttaattgaagcctttgatttagaaatgtctatgtttacaaagacaaaagcccaattatctgcatttatcttgggggctgaaaagcaaggaaacaggggagatgagtttgaacttagatttcctaatacattaaaaattgaaaaatacaaacacattgttgattggtatagaaatcctgaaaatctagattataaaaaaaacttaaaggttgatgttgcaggtgtacctcatatttttgcctggggaggtttacatggggcattaccaaagtataaagatgaagggataattttatgttgtgatgttgcatctctatatccttcaatcatgattgaatatgattacatcagtcgtaacgtgaaaaaccctttgaaatatactgaaatcagagatacacggttagaattaaaacgcaaaaaagatcctaagcaggctccctacaagatcgtcctaaactcaacgtatggagcaatgaaagatcagtataatccactttatgacccgttaatggccaataacgtatgtttagccgggcagctgttgttattagatttgatcgagaaaattgaaccgtattgtaaactgattcagtcaaatactgatgggttgtttatgaaagttgagaaagaatctgatattgatttaattaaggaagtggcgaaggagtgggaaaccagaacacgattagatttagagtgggatgtttatgagaagatttatcagaaggatgtaaacaactatataatcattgataaagaccagaagtataaatctaaaggtgcttatgttaaaaaactaaacaacctggattatgacttaccaattgttaataaagctatgattgagtattttacaaaagatattccagttgaaaaaaccatcaatgaatgtgatcagttaagagaatttcaaaagatatcaaaggtttcaaacaaatatatgtacgctctctatggagaagaaaggctacctgaaaaagttttaagagtttttgcttctaatgatgaagatgctaaaggtgttttcaaggttaaaacagaagaacgaattgaaaaaatcggaaatactccaccgcgctgctttataaataatgataacgttattgatttaaaagttcctgattatcttgataaggaatattacatagagatagccaaaaaacgaataaatgattatttaggaatatcgaatagaaagaaaacaaagaaggagaagtgatatgcatcgccattaagagtaaaaataaaattaaaacacacattttcaagtctgtttatggtatgatgattttgattcccttaaccactttttcttacataagttatgagcaacatttacataaaacagagggaaatgaagactcaataaaagaatcattttataagaagcctagacagattaggataccatcaagtgagaatattgtcttacggctatttaaaaaagctcaaactaacaaagaacagcaattaaaaaggcatacagagaagattatctcagcaaaactcattaaacctaagcaaagtaaaaaaaggcacaggaagggaggtgagacggtaaagcataaactttttaagagtaaaaataaaattagtattaaagaaaaagaaaacaagccaccggccgcaaagaaaaccatccaggttaagctgagtgcttatattgcccactgccaagaaggatgcacaggaacaactagaacaggtgttgatgtcactcaatcaatctattacaaagggtatcgtgttattgcaaccgaccctagtgttattcccttgaattcaatagttgaagtaagcattggtgggaaaaagttcaaagcaattgcaattgatactggaggagcaattgttggaaataaagtggacttgcttgtagcaaccgagcgtgacgcaattaattttggcaagcaaaaggggacaatctcaattattagttaggaggcgattaattgccgaagttttggtcttatccagaagggttaaaagtcatcataaatgagaatgcaaagaacgcttgtcctcatcatgttggacgggaagggaaaattattgagctgctacactctgccacatatgattacgcagtcagtgatgaaacaggtgatattacattcttcaaggagcatgaattaaatccagctaaaggaggttgattgtatgtttaaaaagggagagaaggtgattgctggtttcacaggagagattggtgttgttgcacaagttgataaaggacatgagcaattagaagttgagtatccagacggctcatatagagtgattggcttcagcaatgtaagaagggtggaagataaatgacgatgattattttagaaggcactgactgctgctacaaatcaacagtagcagataagctaagcaaagaactcggatatccggtaataaaaggatccagctttgaattagctaagagcggtaatgagaagctgtttgaacactttagcaagctggctgatgaggacaatgtaattattgaccgatacatatattcaaatttagtttatgcgaagaagttcaaggattactcaatcttaacggaagagcaacaaagggtcatcgaggagaagattagggataaagccaaggtgatctacttacatgctgatccgaaagttattaagcagcgtttacttgaacgtggtgacgaatacataaatgatcgtgatattgagccggtattaggattatacagagaagtaatgagcgatgttgggttacatacatattcatgggatacagaacagtggtctagcgaagaaattgctaaaggcataatctttttaacggatggggtgatttatgaagaaagtaattgcaattgacatggatcaagttttagccgatttactaagtgattgggtagcctacattaacacctatgatgatccttttctaaaagaggaagatatactgtgctgggatattagcaaatattcaaatacccaaaacaatgtttacaggcatttggattacgaattattcagaaatctggatgttatagaaggaagtcagagagcagttaaggagctggcgaagaaatatgaagtatatgttgttactacagcaacaaaccatccagaatcccttaaagcaaagttagaatggctcacagagcattttccatatattccacatagtaatgttgtgctttgtggcaataaaaacataattaaagcagacatcatgattgatgacggagtgcataacttagaaacatttgatggaatgaagatactatttgatgcaccgcataacaggaatgacaatagatttattcgtgttatgaattgggaggagattgaacggaaattactttaaaatatcattatatttagagtgaaaataaagttaaaaggagtgaattaacactccttagtaaactaacgtgcttctactgtaattttataaatcacataattgtcgttaatgtcatacgcgtaaaccaatgctgtgcccaaagttgaatgagaggatacgacaccactggaactaatgcttataaggttgcttccagatacaatttcccatcgggtgtagccttttaatagagatacgttagaattcctcagcatgtgaaaatcaactgtaccaagcggatcacctagctgcttaacttgatcaattgatttgacaggggttaaagcagaagcctgtgatgtgaatgcagggagtgctagtgctgtaagcaatagagcagaaacaatcaatcctttgtaaaactttttcataagaattacctcctaggttttgattgtgattacatctccagtctagcatgttaaatatttgaaatgtgtgaagtgtttgtgaaactgtttaaaatatctcttttaaagagaaaggggagactgtaatgggttatagacattatatgtataaaatcagcaaggaacttgtaaacgaaataaaatcaatgaattacaatgaattgtccaaaaagttcggtgcaataggagaagaaggttatttctatataggtaacctgcctaaagaggaaatttgggagtttgggaagttgtattgggatgatacagccgaccgcatttattcaaagggacaccctctctttgaaagagaagaagttatgaatgaattatcggattatgttccatatattgttggtaaagaagggcttgaagaagctattgaaatttataaaaacaaagtcattgcaatgtacgagaacttgcttattgatgataaaaatggaactgcttcagtaaaacaagagcagcatattaagaacaacttatctgagtggactagaggatgggcgttaaatacggatattaatgattcatggctaacatcttcttggaaatatgaatacagtatttttgagctggtcagattattaaaaaccatagattttgagaaagagacaatattattttacggttggtgatctaaataaaagatcaattttatcgaaatgagggtgtgaaatggaagttagatggttagttatttttaatgattgtaaaaccggcagttctttgagtgagcttacatatagtaaggatggggaaggaaaccacctaagattagagtcaatggtgcctcgtacaggtgactatattgtaggaggagatctgtcatcagatataaatgataagaggtgctttattgtgaaaaatgtcttctggaatctagataggagagatatagaggtttatctagatgaggttgacaggactgtttttcctttatataaatcgctataaaatttgtcttttaaagagtaaaaataaaatataagaggtggagtctgtagtgaactacccagaaagcttaaaagaggaagccgaaaaaattaaagatgaagtaagaagcggcaaattagacgaggggaaaataaaagccattgctaagtctgcagttgagtttttaagatctcaagaaaagagtcatgctcattgtgcagaagttgctggagcgattgctgcaaacctagatgagttcttcaagtcttatctaaaagaagattaatacaacaagataacaagaaaggataaagggatgtttattgaaaaggtactatgttagatgtaaagatcacaaaggcgaaaacgcgtctttggtaattgaagcaatgtctacagaagaggctaaacggaaggcattagacatacataaggtaaagactgtttataacgtgagcattggggaaggtagggggacaaattgccttcagagaaaacattcgccgtacataaagaatgacaacgggaaagctataatcatattctcgtagaggaggtatcggataattagggatactgccagggatatcattaataatgacgttgatgagattgaggaaatattagataagctttgggtttatttagagaacaatttaaggccagaggataaccgtatatggaagaggtgtgattcggatattttggcagcaacagtaaagctaagaaatttaaaagaaactttttaagaataaaaataaaatagttgttgattgtttgagagaatgcgagtatattagaaatataagaatcgaggtgatgcattggagtgtgttaaatgcaaggatcacattggcgaaatcgtttattacataagaatagctgacaacaaagaatataaggaattcgcggtacataaagaatgcggagaagcaatcaagaaagaatgcattgaaaattgtaaagacatgaaattagaaaagacattggattacttgcagttactttaagagtaaaaataaaatattccttttatcgagaatggagagatgctaaatggataaattgaaagtttgtttacataaaaaaggtgctcatacgttagaaagaactgttaatggaggctggatattagattcaaaaccaattactcaggatcaagcaattaatgaactagttgaagcggttagtgatttaggatattggtgccaagtagcaaaggatgttttagataatgaagactttaatgcagttcaagaggcgtatgaataccatgagtaataatctagtccattataagaagggagaatgaaatgtcatatttggtgctgggactaatcttgttcggttcaatattcataggtaatggacttacaagtttagttgagaataaaaactttaaagaagccttgccattttatctcactgttttcttaatgggagcttgctcgctccttatcggatttattcttacagtgatatgaacaagatgaagggaaatagtgaaaggaaatataaatgatttcctgggaaagcgcagtatgcgacaaattggaacaaatgatgtctttaggtgataaacaaaaaaggagcatagagccatggaaacattagatgcaccaatttatgagattaagcaagaaagcaattggtataaaactgagaagaaacgaagagaagatattaacaaattctttgatgaattcgaagcaacatacggaattaagaatggtttttcgttctatcattccgagtatttcggagtacgcgcaggaacagaagcatatgacttctttaaagatgaagtggtgaaaaaccccacaaaagctggcttctatgcatttaaaaaacgttctaagtatttcacagacataaggtctatgctagagaaaatagaagaggcaaatcctttcaaaggccatgatgtgttcgggagaaataatataactgcaagccagtgggtaggtgatagatggttttttggcgtaagagatgagaaacgtgtagaaggtgaagaagctgtagctattgacttcaaagattatcttaaaattatcttggagaaattaggttaaaattcaatttttataaagaaaggagaaaaacatgagagacattacatccgaattcacattgagaggagtaaacagaaaaactctgaaactcctggcaactaagagtattgattatccagatacatgggtaaaggttcaaattggagatcaaatagcagaagttgaggcaaagcaactgttggtggcaataacggcatttaatgaaatgtgagaaggaagaaactaacatggagaagtgtagagcagtatttaaaggcaagaaaatagaaaagatttaccttttcagggcatatccatcgtgttttcatggcgtccatgcgaaacgaaagccaccagctattgaccacgagtatttagatatatctactgaaactttttatgaggatgaaattaattttgaagttaactgtggtgacactctttacataaatgaacttgatgaaaatgttcatatagaaaaaaaggtcaaaatgcttgatgggggatggatttacttcactgattatgtcattagcacagtcgagaataaggagagtaaaattcaagctgaaaaacaattaagggagtatttagacgaaagtaaagtaaaagaaaagcatgataatcagctaggaaataaaaggatatcattttggcaacatttgaaacatgcttttaagaaagagatgcaacagtaggaggtgaataagtgggacgacataaagcaacatttgaagggaaggtaattaagaaaagttggacattaggcttgtgtgatgcccttgtcccaatcgagcagcaatgtgagtatcagacattttttgaagggaacatcgacttagacccaattgaagtcggagggaaagtgtatatcccagggtttaacgaatacgtagtcgtaacagacaggcaacgcaacacaaaaaatgaatggacatatcagactgacaaggtcattaaaacaattgaggataaagagagccttgaaaaagcaattcaaaaacaagaaaaaatagagaaatggaatcagcaagttaaacaagactatgaacgctttaaagagcaagaaaagaaacgtaaaacttcctggtggaagaggctaatcactaaaaaagactaaaggagagatatttattgaataaggatacaaaagatatttggaacggtttctttatcggatcaggttctctgattgtagtggggttactcatttttgttgaagcagtgactatgtcactagttgtctattatggattgaatcatgtgttaaacccattgcttattgatacatacaacattcaaaatacccatatcactttacctcatgcatttgtgattggtgttttactcaacgtatttgtcaaaggtgtaaaacggtcagatcaggaaaaagatgagaacattttcaagaaagccggtaagtctttacttcattcagcttttgcattgattgttctgtatgtcagtacattgtttatttaacgaaggaggaatctgaatatgattaaatcgcagcaagttaaagtttttagagagacgttacattgtgatgaatgcgaagaagctccagagcttgtgttttcaaatatgatgctcacatcaaacccaccgaaatatccgtttcaatgcccattgtgcatgaaaaaagtttatatgaaaacaacctatccaaaggttagataccaatcagttgattgaagtctaaatgaaagttttattttattgaaaggatgaagaagaatgaaaatgagaaatgtaaaactgtacaaaacgactgaaaacgtttttcttccaaatgaaaaaacattggtagggacttttgatgattgtgaaatgtatgaaggagaaaggagtgtattcttagagattgcaaataaagatgatcttaaaccaagtgactctagtattcatatagaagatcctacgattttagaaatcacaacttgtcaaggcaaaacaaagactattaggacaaggaaaaggttaactgacatttcttctgatttaattaaaattgaattcacagttctgtaggtcgtaataaaaggatgattttagagagaaaaggaggaatagctatggcttatgatgagatcaatgggaaattaattaatcctaaagttagcgatgtaattaaagcgctacaagaccaacttgattttaacggagatacaccaattcaattcagaattgatggtgaagaaacaagcaatgaaattcaattagatccatataaaaatgttcttgtgtttcatttagatgaagtttaaggaggaaagctacaatagacacatttgttttatcggttgtcaggatagacattataaaggcggtttatatatggttattggagaagcagttcacactgaaacagaagaaaagttggttacatatgaaggccaagacggtgttctttggaaaagtgattattgatgggaaagagatcaagagattcacaaaagtaaaataaaaggagaattggctatggggattaaagcagcagtttttgaaataaaagcaacttgttacgctcatgagggatttaataacgaaagtgaatctgttcaaggggctgcgttagaacagctaggaaaggatatcgtagataatttactcgaaaacggtgttgatgatgtaaaaatcaaaggcgattacgttgaggaattgggagttgagaagcccgttatgaagtacttcgaagtgagcgatccctattatgcgttaattaaagcttactcaaaagaaaaggcaatgaagttatatacaaaagaagttgctgatgatgacggggaattaagtgatgagatgactgaagttggacaagtttatgcggcaatacgacaaggaagggttccgggagaaggtgaagagcttatgccatttaagcaggttcttgaagagatttctaatgatgaagaaatggtattactaatcgagggcagtttactttaacggataaaaatacaaggaggtgaattcatctgggaataagtcaaagacagggcaaatatatcatggaatcgattaatgaaacaaattcaattgcagaaataattggtcatgataaagctatcagtgaagtgttgcttctattaagggaaagagtgttgtttcttcaaagtcgatatgattttgaagaagtggaaataagattaaatgagctcatgaagctgtatgaaagtatcaataaacttcaaagaccacgaaaggatgatgaaaatgaataaaaaatacggactttattgcatgggaacacttgttaacacttatgatgacgctattgaggctcataatgatgctgtgtatgctcaagaagaaagtggagtgccgcatgaagtaagagaaatcagaaaaggagagtagataggatggaatacactaagtatggaaatcttgtagaaggctatataacattcaatctttattttgagacatttgaatacaaagaagatagcttattagaacaagtaaaattcaccacagttaaagagttattcaacatgatgcagccagactatgttgaagaactaaagcaagaaaacggtgcagatcaggttgacgttcatgatatcacgtttagcgctaaagaagatgacactgaggctttcatcacaatgtatgacaactcaggaaactatcgaatctcaacaaatcttgatgtaagtggcttggatagcgagtacaagcaaacattaaaaagcattaaaggtattatagataagaaactttgagagtaaagtaaaggatgatgaaaatgaatattagagagtttattgctgagcagagaaaagacgaaaagttcttgggtttgagatcaaaattaagggaactaattgaacacagaagacttgaacttgttgaaatgcttggatataaaatcgatagtttgaatcaagagcaacttatagaattcaaagaaaaattcagtgaattaactgcatttaaagaaaaggtaggtaatgatcctttcagcattagtctggatgaacttggcgaacttctatgtttccaaaaaaaataaggaaggtagatacaaaactctggagtatgttttgagtaaaacgattgatccatacattgataaaccaaaacaggctacagttatttctagataaaatcacagtttcaaaggaaggggaagcaaaatgagtgcagcaagaaagtggagagatttgagaagcaaattaattggatataaggtctacggtaagttcagcgatgttgttattgaccatattctaaatgatatggataagttagacgtaagacatgacaaagataaaaacaaaaaataaagaaaagggagttgtggaatgggagctgctaaacagttatacgttaagcgcagtcactttgtaaccttggatgaagcaaaagaaaatacgcaagtacatatgaagaatggtggttcatacactgctttaaaaggagagctgattgcgactaatcttgaaggggatcaaatggttatcacacaagagcagaaggataactacattccagtaccaatgacagagttatcagattatgaagctcaaatggccaaaggctatgctgaaatgggagacattaatttagaaatgtctgaagcttttcatcatgctgaaaatgaagcagaaacaaccaccaacagtttggttaacggagaatataaagaatattgattattacatatgaaagcaagacaggcaatgtgaaaaggtttgctcaagctttacaaagggagttaaacttcgatgtcattgaaattacagatgacttaatcattgaagaagaatttatacatattacatatacgataggctttggggaagtacctgaaaggactttaaactttattattaagaataaaaataaaataaaaggagttgttgtgagtggtaacaaggtttggggtgataactatggtttagctggggacaagctctcagcaatgttccacgtaccattgttattaaagtttgaactaagcggaacaaaacaagatttgcagaagattaatcgggaggtacaacttattgacaaacacaataccaaagtggattaagctcaataatgagatcatgattcagaaagacggtaagtttcaatttgagaaggataaggaggcagtacacagctactttgttgattacattaatcagaacacagtctttttccatgacttaaaagagaaactggattatctgactaaaaatgattattacgaagaagaattcttaagcgaatacacatttgagcagattaaatcgatttttaagattgcttacagttacaaattcagattcccttctttcatgagtgcctttaagttctacaatgactatgcattgaagacaaacgacaaaacaaagatattggagagatatgaggatcgtgtctcaattgtagctttatattgtgcagatggtgattatgaaaaggctattgaggaagtacacgccatgatgaaacaagagtatcagccggcaacgcctactttccttaatgcaggacgtaagcgaagaggtgaaatggtaagttgcttcctacttgaagtgggagacagtttgaatgacatctctcgtgcaattgacatttcaatgcagctgtctaaattaggcggtggtgtagcattaaacctaagcaaattacgagccaagggtgaagcgattaaagacgtagagaatgcaactaaaggtgtcgtaggtgttatgaagctattggataatgcttttagatatgcagatcagatgggacaaagacaagggtctggagcagcttatctaagcgtattccacccagacatcacagacgtccttgataccaaaaaaatctcagcagatgaagatgtccgagttaaaacactgtctattggtgtagttctccctgataaatttattgaattggcaagagaagataaggatttttacatgttctatcctcactcagtctacaaagaatatgggaagtatcttgatgagatggaaatcaataaaatgtatgatgagcttgttgaaaaccctaaagttagaaaagcaaagggaaatgctcgaaaactgttagagcaattggccattctaagaagcgaatcaggatatccgtatatcatgtttgctgacaatgtaaataaagtgcatccaaatgaacatatttcaaaagtgaagttttctaatttgtgcgttactggagaaacacttcttttaactgagaatggatatgaaaaagcagctgatctttacaaaaagcagaatgagcttaaagtggtcattgataatagaacaaaagattttgcagttggcagcaaaggtacttcaatagtagatgcaattccaatgcaattgactaaaaaagatgcggaaatatttaaagtcaaaacgaagcaaggatatgaaataaggacaactgagtggcacaaattctatgtgaaaagggacggtgaaattcaaaagctccaattgaatcagctaaaaacgggcgataaattattagttcaatcaggtgagggagcatacggcgacattcatgagccagatcttgcttacatcatgggcattatagctggggatggaaccattactgaaaaaactgccaagatttatttatacgataacaaaaaagttcttgagcagaaagttactgatgcagttcaccgtattattcaaaaacacaagctcgatcgtgcttataaacacaatacatcactggctccaacatttaatatggctaatccagaaaaacaagatttactctacatgaatagtacagtcttatttgacatcttgaagaagttcggtatggacaaagaaactaaaacaagagtcccagaattcatttttcaagctaataaggaaacgcaagcagcttatttatcaggtttattccagactgatgggtgtgtaaatgcaaatcataaagccaaagcattaacaattgagttaacatccattcactatgagagccttcaggacgttcagaagctattactaaacatgggtgtttatacaacgatctattctaacaataagcgttcacaagaactccttcctgacgggaaaggtggttctaagctgtacaatgtaaagccaactcacaaaatcagtattcaagatagaaactcaagagagttgtttatgagcattgttgaaatgaaagaatacgatatttataaattcaatttgctaactgagacattgcaaccttcttcaagaaagccaaagcatgattttacggctgaaattattagtattgaagaagatggtgttgaggatgtttatgatacaacacaagaagactatcactctctgattttcaatgggattgttactggcaactgttcagaggtgctccaagcatcacaagtctcagtttatacagattacgatcaggaagacgaaattggtttagatatctcatgtaatcttggatccatgaacattgtaaacgtaatgagcaatcaatcaattgcttccacggttagaatagcaattgactcactaacgactgttacaaggaaaacaaacattgtaaatgccccagctgttgcgagagcaaatacactaatgcgatcaattggtcttgggcagatgaatctacatggttttttagctcaaaataaaattgcttatgaaagtgaagaagctaaggactttgcaaatacatactttatgatggttaacttctactccctgcaacgttcaatggaaattgcaaaagaaacaggggagacgtactacaagtttcacggatcaacttacaaatcaggcgagtattttgataagtacgtgacaattgattatagccctaaatatgaaaaggttaaaagcctgtttggagatcaacatattcctaacattgaagattggatgaagcttaaagaggatgttatgaaatatgggttgtatcattcgtataggcaagctgttgcacctactggaagcatctcatatgttcaatcatctacagccggtgtaatgccgattatggagagaatcgaggaacgtacatacggaaacagtaagacatattatccaatgccaggtttatcggctcagaattggttcttttataaggaagcatacgacatggatatgtttaaggtagttgatcttattgccactattcagcagcacgtcgatcaagggatttcatttacgctgttcttgaaagatacgatgacaacgcgcgatctgaaccggattgatttatacgcgcatcatcgtggcattaaaacgttgtattatgcgcggacgaaagataccggccaggattcgtgcttgagttgcgtagtttaaacgaaggggaggcggagtcgtgaagttagaaatcggtcaagagtgggtcagtgaaaagcacccacatgaaaactttaggatctacggaggagtagtggatacttgtgcagactcatttaaggacgaaagcataacattcgatgagcagccggaatgggctaaaattttcttctgggagcgggcggattatgcgagtttcgataaatacgtcgaatcaaagctaggaaggaatcgagatagtacgtatcctttcgctagatgtggagagacgaagaagtccggattagtagcaaaaatcaaaaaattcaatatggtcgttaaagagaaggaggatgaataattgacgcaatatacagcagcaaactggtcaaagcatgaagatgatttcacccaaatgttttacaaccaaaacgtaaagcagttttggcttccggaagagatcgcattaaacggcgatcttcttacttggaagtatttgggtaaaaatgagcaggatacgtacatgaaggtgctcgccggcctgacactgcttgatacagagcaggggaacacgggcatgccgattgtggccgagcacgtcgagggccatcagcgaaaagcggttcttaatttcatggcgatgatggaaaacgcggtgcacgcaaaatcttacagcaacatctttcttacattagctccaacagagcagatcaacgaagtgtttgaatgggttaaaaacaataaatttcttcaaaagaaagcaagaacaattgtttcaatttatgaagcagttcagaaaaacgatgatatttccttattcaaagcaatggtagcgtccgtgtttttggagagtttcttgttttactcagggttttattatccactttacttttatggacaagggaagctcatgcagagcggggaaattgtaaatttaattatccgtgacgaggcgatacacggcgtttatgtcggattgttagctcaagagatatataagaaacaaactcttcagatgcaaaaagaattgtttgaatgggctttaagcttgttgcaggagctttatgaaaatgaattggagtatacagaagatgtttatgatcaggttggtttagctccagatgtaaagaaattcatcagatacaacgcaaataaagcattaaacaatctgggctttgatcattggtttgaagaagaggatgttaatccaatcgttattaatggattgagcacaaagactaaatcacatgacttcttttcaatgaaaggcgttggctataaaaaagcaacggttgaaccattaaaggattctgatttcattttcgatagcaaaggagttatttcatgagactgattaaattagaacaaccgaattgcaatccttgcaaaatggtatccaattatttaaacgaagcaggagtcgaatatgagacatttgatgtaacacagaagccagaagtggcagcgcaatttgaggtaatgagtgtaccggtgactatactgctgaatgagcaagaagaagtaaagcgtagtgttggatttaagcctgaagaacttgatgaactactaaagggattacaataaaagataatttccttaggggagggctaaccatattcggttggaatattaacgagatttcatggtggaagtacatactgcttttaatttttttaattactgtaatacctttgttgataatggattggataaccttctgtaagattaagcatattgactggattattcaacgatattcatgttgggcggcctatttaatttttggatagatttttcacataataaaacaaaaggagaatgttaaatggggaaaatggatgaagtaattgttgtagcacctagagataaagtatttgataatgaagaactagtctttcaaggaattgaatctgatctaggcaaggttgatcaaataatcgaaaatctcgctgaaagcatgatcactatgaataggggagatgctgagagggatcaaagctgtaagcaaccaattccctatgccattttacaaaaaggagaccgagtatttgcatacgagcggttaagaaaaagcggggaaaagaggcttcatgatcaattatcaattggtgttggcgggcacatgaatttaactgaagcaacaaatttttgggaagctattgatgagaacttaaggagagagctttcagaagaggtgtttatctcaacttccaatttaaatttagaagttgtggggttgataaacgatgacttaaatgaagtggggaaagttcatttaggcataatgattattgttaaactgcctgaaaatgcagaggtatctgtaagagaaacagatcaattaaaaggcttttggttaaataaacaagattttgataatccattagtatttaatcgtttagaatcttggtctaaatacgtggcagatattatttattagtttaaacccctggctttgatcatgatgtttgtcagtggagggtctcagccagggtacaacttaaaatactcaaaaaactcaacaattatgcctacaaaggagatgctggatgaaaaaaagattacgcaaaaaggcgtggatgacagggaatataaaacagggcgaattcatgtttaatgtaattgataaggtaaatgcagatggacatgtatattatccaaaaggacactatcatgtagacaggaaagggaatatgtacaagttcaaaatttagaaacaagcgaaattgtgatgactaaagttgataaagatcttagggataccaaagggtgtcgattgaacgaacatctctataaaagaagacttttatttaaaataaagaggaggaaacagaccataaacaataacagtcataaagatttgcaagcaaagtatgatgatatgctcttcagaaacggactttgtttggggtttattcaaaaacaagggcttgcagatgtgtttttggagcatatgaaacaagttgcagcttatgaagaagaccaaaggtatagagttgcagcagttaattttttgagtttattagaatcaaattaaaacaaaaaggagatttgaaaatgaaaatttcaattaaaacaaggctaaatcctactgatcaatataaggttgacgactttattaatgcatttaagaacttgccgccagaaataagaattcagctttctatggacaacgggaacagttggctgttagaacaagtgtcagtgaaaacagaaagaatccttcttgattgtttacaagaagaaattaaaaatattgataatcaccctctttattctcatgccacttcattagggcaaactgtattccacaatactcatgaaattgtcgatgttgtcaaagagtatgtgaagaaaaatggataaacatatagagaaaatacaagcccatctaaaagaaatagaaaattttaaacaaggcctccaattattcagtgaagatgaagaagaatacataagcttattagctaagattcaacatcagtttgatttaatttcagacgaatcaatggaagggtttaaagaattaactttacatataagaaatacaggtcagaaaagaatccaacggagaattgatcagttacctcacacaatcaaagaaagtgtaagtgaagaaattaaagacatgaagagagccggcgagctttttgattgatatttaaattttaaacatggctatataaacagtgacaagtatcgattgggtgtgaacttaaatacaatacattgaaaactgtgaagaactggaggttttaatgtgtttagacaatatccaatatggtacacaccgtcgctgcatactttgaattacttgccacaatttacaccatacattgcccactttaatagtgctgaacgatgttttcaacgatgtatgtaccaaacgcatggcaatgttgaatggtgccatagaaactgctacgacccgatctatcaataaatttaaccagagcagttggatttaattcctctgctctaaaaaataaaatagggggatgtattataattacatactttacgttaatacttgcagcatacttatttgcactaaacattaatgaaattagattaattactcgaggggaacagaacgtatacgctaaagtcacacatttgctttctaactcaccatataaagaactgaagaagaataagaacttagtgtatgtcatgacattgttcaaggggatttcgttcattatccccttggctactattggactgattacgcatggtaacttgctaatgttagcttgaacagcttttgctttaatatataccggtttaacaatgtttaaaattcttgatgttttggacggtgactcaaacaataaacaaaacaagttcgtgtacatgctttttgtttgcggtaatattgtcttcgtggttaactttattatcagttggtttagataaaggagaatagaattatgactcagtttgatatgcagtacaacacaatcataaatgacataattaataatggggcatctgacgaagaattcgatgtcagaaccaagtgggatacagatggaacaccagcacatacattaagtgtaatcagtaagcaaatgcgctttgataattccgaagtaccgattttaacgactaaaaaagttgcttggaaaacggcaatcagagaattactttggatatggcagcttaaatcaaatgatgttgacgaattaaacaagatgggcgtacatatctgggatcaatggaaacaagaagacggtacaatcggcaaagcatatggatatcagcttggtaagaagaacagaatgctaaacggtgaaaaggttgaccaggttgattatcttcttcatcagttgaaaaataatccatcatcacgcagacatattacaacgctttggaatcctgatgaattagactcaatggcattgactccctgtgtctatggtactcaatggcttgtaaaaggcgggaagttgcatttagaagttttctgtcgcagtaatgatctcgcactcgggaatccgtttaatgtgttccagtacaatgtattgcagcgtatgattgctcaagttactggctatgagctaggtgagtatatcttcaatatcggagactgtcatgtatatactcgtcatatagacaatttaaagattcaaatggacagagagcagtatgaagcacctgagttatggattaatccagatgtaaaagatttttatgatttcacaattgatgatttcaaattggttaattataagcatggagacaagctttactttgaggtagcagtataatgctatctcttattgcttgctgcgataaatcaatggccattgggtatgaaaataatttgctttaccatattcctgaagacatgaaacgttttaaagaactcactacaggaaagttgtgtattcaggggagacttacatacgcttcaatcgtaaacattacaagaaagccacttcagaaccgaaagaatatcatattgactaaaaataaggatttcaagcctgatcactcttcatttgtttatcattcgattgatgatgtattaaagcttataagaggacaattggataaagatgaagaagtaatggtaattggaggaggtgctatatacgaggcattcttaccacatgctgataaggtttatttgacgattgttgattcagttgctgagaaggcagattcatattttcccaggttaaatgatgactggagagtaattgaaaaggatcacaggaaagcagacaacaataccacatttaattattcatttgtgacttactcaaaataattttagaataaaaataaaatagttatagactttttagaagttgaatgataagataaagacaagttaaaagcttgtcttttttttacatacttttagaataaaaataaaataataaataggagtggcgatatgaaaactgcaacagattatcttgtttccatttccaaacctcttgttgcaattgaggagactaaacaacgacttcaaaatgaaattgataacctttataaagagctagggaaagttgataaagagctcaatgaattttatcacaagctagaagaggacaaatttaatgcttcagagggatatcacctttcgttgaaaggtcaaaagatattgagaaagcgaagaagcttaaaacaagagctccaattactgaacacgcttttcggaagtttaaacaataatggatggactcttgaatcactgaagattgcagaatataaaattagcaaaaagaaaaacaagcatttacagtatgaatcggtttaaaaacaagcctacataattaaataaaaaagagagggaagccctctcaatgtattagtaattataatcccaataaacatcaacattaacttttacttgagctacactgtcattgttatgtgctcggacatacaattgttttcctgaaataagtgatgtgtttacgctaaatactttgtaaaattgttcactaatataatttccgccactcggtgtaacagaagccagcacagtgccatctgacttcattaattcataagtcacatttgcacttctacttcctgtccctgttgaccattgtttccccatgatggaaatcttggttacgttgtttggtgtaaagctagtgactactgttgcgtaagatgcagggcctgaagtagatctacctatgttgacttcaccaacaccatttttaacgtgagtatcagtcccaagagcatgaaaactaccggtgtttgttaagacctcaagattattttgaggggcggcaaccggctcacttttagcagtagcattcgctgacgcagctacaccagtaagaccaatagttgaaactaataaagcaattgctgttttcttcattaaaagcatctcccttggtttaggtatgtaatacaactatattataacaattaattttgaaataaatggagaatgttgtgaatatatggtgaattttctgaatggagtgtgaatttcttcggtgagaactttaaggaggtgatatattgcaacaaaaagagcaagaattgctgtcaaagaaagaacagcttgaaattgatgttttagaaaaggaagcagctttactccggctagaagtggaacaagaagattccaatctccacaaaattggggagatcggtgtacttaaagaatttcttttatacataaagaaatacagatcaatgtttactgtgcagcaagcagaagaatttagaaatatggatgaccgaatgaaagaaatcatcaaagtccaggttggacaagtaatggttgatgaagaagctttagagggatttattgaggaaattgagaatcaaattaattgaaagtgggagatgaggaatgaatgaaaaattaacgaaagatcaactcgaagaaatccgtcaacgtatggaagcgacaaccaaaggattttggcatgcaaacattcaccatgaatggccagggaacgaaaatcttcgttattggatagttactcttgaggatggtttagcagctgcagtaactaaagaagacgcggacttcatcgcaaacgctcggcaagacattcctaggcttctcgattatataactgagcttgaaaggaaacttcagaaaaaagaatatgaacttacagagtgtaatcgtgtctatttagagctgttgagtaaacaagagttcaaaacaactgaaatctaagtaaaatctgtattttaaagagaaggtgatgcagtgaaagagtcgttgaagaatgattttcaagagtttatgagtattgcaaaaagctttcttgctgtttctggagcagtcttttggttattgataatttcactcgtttttgctgggggctattaaaatgaatcaatcatataaagttagtctagaaaaattaccaattgaaagcttagagagactgaaaacagacatacaaaatagaattaatgatggattgcgtaccgataacaatgcatacataaaagaccaaagaagaaaacttcaaatcgttttaaacgagctggttagacgaagtacatttgttcactaaaggaggtgaatacaatgccagtagtactttatggatttggaagaggagcataaaaagagaggggagtaatcccctcatacattaatgaaattggccattcatgctttgttgggctaggcgaactaaacgttttgtgatttctccacctactgaaccgtttgctcggctagttgtctcaggccctaagttcacaccgaactcagaagcaatttcatacttcatttgttcaagggcaccagcagcttgaggcacaagtaattcattgctgttgtttgatctgttttgttgagccatatgatcatctcctaaagttgtatgtaaacaagcttgttcaattgtattgtgtggagatgttttgtaaatatacacattaatttaaagtgaggggatttaaatgtcaattggtcatggagcatgaattaacacgtacttaaacaaagaagggggataaaatgaaaatcgattatgtttcagatctgcatattaatcactggataccttgggacaatgaccaaattaaatgggaaaggcgaacaagggagattattagaaggctgatatcgaatggaaatggagaggtattaatcattgccggtgattttactgagtggaatcaacagacactgtgggtacttgatgaagtagcaaagcagtatgaaaaggtttacttcacatatggtaatcatgatctttatttactcagtaaaaatcagcaacgaaaatattccgattcattgggaagggtgaatgatttaattcagaaggctacagacatcaataatgtcactccattaataaagtctacggatacatacaaagggaaagtctttgcaggagatgttatgtggtatcttccaaaaggaaatgaaggatgggatttcttcaaaggtgtctctaatgattcaaactatatcagccttaatggatacagcaaagaagatggggtacgagcaatgtggaaagaatcaatgggctggtatgacactcttgaaaactctcacattgatgtatttgtctcacatgttccacctgttcacaatccttattctccgtttgagcctaacagctgctatatggttgatgtcccgttcattaacgcaaaacattgggtttgtggtcatgatcatttacaagctgagtttgacaatgatggaacgagctttcacatgaactgcattggatatccatatgactatgatatgtatcctagagtaaatgagataccaggtaagcaagttgatacgtataaaacgtttgagctgaagacatttgaaatcaaatgaaattctaattttatacagaagggagaaagtaaaatgtctaatgtgaaaattaaatatgttacagactgtcatgacaaagagtttacattaaataaaaaatatgattttcgtataaccgatgatggtattgaaatcattgatgatttaggtgaagaacatatcattgcaactaaagacaatgaatatggggcttatgaacacgatgaatttttcagatcaagatttgaatttgttgatactgaataaaatgttgatttcatttagaagggataagttcaatgaaagagattgaatttgatgaagttaagaaatttgttgaagtaatgtctagagaatttagatcaacaaagatgatgaaaattaaaattagctatgctgaatggttagttgatgaagttgaacgattaaggggttagtcaaaagtgagcaatagtttagagagaaagattaatattcatttcagtaatggctcacatatcgagtctaaacaactttctaataaactaagggggtacaatagcaatttcttatgggagcaaatgcaagagagtatcacaaaggaacttaaatggtggggagtcactctaactggaaatcagaaaactgtaaaagctttaagtgagctaatgaccattaacaaaacattgtttgagaacctttataaggtgcaatcagacaccatagaagagcttgcaaacaaattatatgaacaggttcctgagtatgagaagaagtttttgaagtttgtcaatgaacagatacctaatctgaggatgtgcctacagttcgagctaccttataatcctcaactaatatccagcatagaatatgaaatttacatatccggtgccgaaattgattgcgaatacccacatgatgctagggattgcattattactttctttcaacggataccagaaataatcggttcatacaaggaggaattagatgaagaatacagagtttaaggtaacaagtttattagaggagtataaacgaagagatgaggaacgtagggaattcatcattcatgaaggctacagagctatcgaagagatcattaaagaagtgaaccaaagaggatcactaaatgaagcagatatttattatggaacacctaaaccacagttaagcttctcggacgtcgaattaggctacatgcttacttctatgatggaatatgctacaaatcatgttggaaatccagttgatgaggaatgtgaacttgaaaataagctggcttactttgagcataaggacgaaattgttcaagtttttgaagtatatggacaaggtactgacagctggtttttgaaaccaagtgacgataccgtttataaattgaataacacagcttacggagtgtatttaaaccagttcgatgatttcattaattacactaaaaataaagacaatgagagtaaaaaggtttcttatggtaccacgatcttaaatgacattgccggcggatatacagttggaagaggttctaagtagatgatcgttacagcttggattttgtttgttgcatttgggcttgttttgttagcaagaatggattccgaagggaatcttaaatttgcagtgtatattggtgtaattaaatttgtttcagttttcattgttgccattgcagcaggagtgatttggggagggttatttcaatgataaagaggattatgagttttaagtttgacgactggagacatattttctacttattaaaaagtgtagcgaagaatttctttaaaggtgattttcatgaagcgagcgatgcactttattggatacgggtacacttgtcttttgaatcaaataaggtgaagtgaacattagataaaatcggtcatttatttagagtaaaaataaaattagatgattagaggtggagagtaataactgagtacattaagaacattcaaatactgttcaacaaaatggaaagacaaatgggtacggtgaaagaagctctcgagaacaaagaatacgaaagagcccaccgtaacctaatcaacctttcggataataatgaagaattgatgcaggaaatcagatgggctcggaaagggattaagatttaacttttcttctttcttcgtggttccattcgtacagctcttcaattgagcaaccaatggcatcagcaaaagtcatgccagtagctaagttcatatttgctttagctccacttatataatcgtggatacgttgtctggggtatcctgtacgtttgaaaaggtcatcaactgtgaggtcatattcaaacattaattcatttaaacgagggcgcaggggtgtccattgcttcatttcgaacacttctttcaatattaattaacataaaacagtgtagcaaaggtttattctaatttcaattttagtttcaatattttaggagagtgattgattgggaggtacaaaccaaggcaaggtttttgaagcaaatatagaaaaatcagctgcaggtcaaaagctgttcttctatagaattaaagatgttaatccagtgtttttaaaaaggggagctgcagtatcaaaaaacaaatatgattgcttcttgcactttaaggggtacttattcccattagagcttaaatcaacaaaggataagtctattgcctttcaagagaagattataaagccgcagcagataaaacacttaaaagaggctacgcaatatccaaacgtaatccctgggtttctatttcaatttagagagccggaaaataaagtttatttcgtacatattaatgatttccttacatataagaacatagctgaaaaacaattgaaacatacatataagaataaagtaaacaaagccagcattccaattgcaatttgtgaagagatcggcacagaagtccgttcgatgaagaaaaaagttaactatacatattacttgaataagctttgcgatgatttgattaaaaaagaacagcagagtgtgagcgctgtatgagtgaattcgttaaatcatcttcaaagcaatcgtttgaaatagaaaaatatcatataacgattgaaagcataaatcaaccatcagctgaagcaattaagaaagtcaacctaaaagtgaatgaagtaatgtctaatttattagcaaaagaaaagagccattaagccggctctttttttgttgtacttaaactataatacttgtgacgattatcgggatgaccttaatgccggtcgcgatgaatcatattgccggcggggaaggcagcaaggatttcggtgatccggctaaccttgccctcggatttacggtgcttgtcatcatcgtgctgctttatcggtttacaaaaggatttttgaaatccatttcaattttaatcggcattgtcatcgggacggccatcgcatattttatgggaaaagtgcaatttgacaatgtggcgaatgctgacgccattcaaatgattaaaccgttttatttcgggacgccgacatttcatgcggcaccgattattacgatgtcaatcgttgccattgtcagccttgttgaatcaaccggcgtctatttcgctctcggtgacctgacaaacaggcgcctgtctgaacgtgatttagcaaaaggctaccgcgcggaaggtctggcggtgttcatcagcggcattttcaatgcttttccgtatacggcctattcccaaaacgtcggcctcgtgcagctgacggggattaagaaaaacgcggtcatcggtgtcacgggcgcacttttaatgctattcggcctttttccgaaaatcgcagccttcacgaccatcatcccgtcttcagtactgggaggcgcgatggtggccatgttcggcatggtcatttcctacggcattaaaatgctcagtcaaattgactttaaaaagcaggaaaatcttctgatcgtcgcgtgttcggtcggattgggactcggtgtaactgtcgttcccgatatgtttaagcacctgccgtcttacttaaatctgctgaccacaaacggaatcgtcgccggaagctttaccgccgtccttttgaatattgtttataatatgattcctaaaacgaaaaaaacccttgatgtgacaagggttcaagagggttagttatccgtttttcttaaaaaaataacattttaataacatttctttatgaaatcccgagatcgaggatgcttccgaaagtttgctgaactttttgtgaggcatcctctttttttattagtttcattgtttgaaaagaaataaattgagtgatgcggcatccgccttatttcgccgaacaaccgtcccgaactatatgtacgtgaacatatgactgaatgtaagaaaaaaaggagaatgggggatcatatcataaacgaatatcattgttcggacggtgatgacacgaaacttggtttagacatggaatgaaatgcctgatgccgaagtgcaactgcagaatgggcgctgagggggagtgtcttgtgcacggatccttacaaaagagagtgaaaagaaggggaagccccttcttttaattaatccatccttcaaaagttgcgcgatagaacccttcgattatctctactttcttaaggtaataagtaacaccatttttaacagttgtatttgggatatcccatctatgaaggtaatccattgtaaaagaatctttgatcgcttgtgtcgaaatttttgtttcagttgagtcgctatttgtattgccagggctggatgcaaaagcaggggaagcggaaacgagtaaagcgagagacaaggcagaaccagttaaaacttttttcaatttcattttaaacactcctttgttttttaatacaattgtattattacacaaaatacaataataaccaagaggttttttgttaatattttgtgggcgcagcgtgaatttttttaggggagtggatggcaaaaggggcaatcctttcatccgctgttgcagcttatttcaggatactgatatgtatatagagaaaaagagttgattattgctggcctctggtgagctgcagcctttgagtgagtgtttgatttagctattccagcgcttttccaacgggaaaggtgtgatatgaaatttaaaactgaaacaattgtacaaaagtaaaaactttatttaaaatgttataaatactaattttcaatataggaggttatctggtggcagaaaagaaaaaagctttaatcattgtggatgtacaaaaagctttcgattataaaaaatggggagaacgaaataacgtaaaagcggaagaaaacattagtaaaatactgaaattatggagagaaaaaggatggacagtcatatacatacaacatatttctgataaacctggttctttattttatccaaaaaatgagggggttgctataaaggagatcgttaaacctatggataaagaggtcattataaccaagaaagtaaacagcagctttatcgggactaatctagaagagattttaaaatcaaatgatataacaactgtcgtaataactggtttgactacgccccattgtgtttcaacaactacaagaatgagcggtaatttagggtttgatacctacctcatttcagatgcaacagcagccttcggaatgaaagaccaaaatgatacatattatgatgccgagactattcacaatatatctctggctacattgcatgacgaatttgccacaatattaacgactgatcaattaatcaatgattttataaaaacaaactgattaacattatagctaaggccggcggtgggtatagcggctgaaaagcatattcaggcgcatacaaggatctcgtctgaaaaaaggcatctgcttcagatgtttttttgtttcttgaaaaacgggctggtaaaaaatgatcggcgcggttaacggtctgattcggctttggttttgaataacaaaaggttttactaatcagcgaattattcaagattttttggcttgtgctgagtctgtgtcttttgatttcctcgaatagattggcttgatcatctttttgtggctgaggctctttgttaagacattttgggtcgatcacatttttaaaatctttgatggttaaaggcttacagtcatcttttaattcgtagcctaattgtccattagcttctaaagtggcatatttaattgaaatgccaagaagccttaaacgcatttcgagttgatctgctgtcagtctcagcttctttaagttttgtatattagttggccgtcttctatatcgaatttagattttccggttaaaaaaaatcaatccagtttacttttacttgaaaccattccatcaaaattaaagcactaaaaggatagacgcagcgattaatgttttcaataaactggtttctaaaatgggatgaacgataatcgtaccgattgaaatcatcaccattgtctgtgcgatggtcatttgtgcaatggattttctccctgaaattctcagtaaaatcattccgaatgcaattataattaattcttcccaagcaaatctcatgttatcaccctagattgtgttttatcaaaaatgaaagagcaagtaagaggtttcttaacgttagctggggaactcaggcgtcgataaaatgttctggattgatagagttgagactcggcttttggatagacacgcgggagagaattttagtttatgtgtttttgcgtctaaaagcagaaacattacaactaataatgatcatcggatgtaataaaattacgcacctaggtgctatatgctggatcaattataaaatggagtgaaactaaaaaaaggggcaaagcccccttatattagcagctttttagttgttacttgagacaatcattccgccgtcatgaaaaatcagcttttgtagacggctgtccaagtgccatcagcaccatggaaggtgatgttgtctaaataataggtgattccattccggtaaattgaagtaggataatcagggccataaccattaagtatgaacgtcgccaaagcagatacttccttcgttttgctttctgcagaaggtgtatcagcaggacctgcggcaaaagcagggcggcagaacagagtaaagcgagtgacagggctgagccggctaaagcttttttcattttcattgcaaacactccttttcttttttaatacaattgtattattacatattatgttaaacatgtacatgcctatctttgttaattttttgtgaacaaacagataatctatttaaacgcagagatgtaataagtatgatgatgaagcaattatcatctataaaaataagatcagaaagcagatgattttctcgaaaatcatctgctcttgcgaaatgaggagttacatgacatttacggaacgggcggtagccattatcaaacagattcctgaaggaaaagtgatgacgtatggtcaaattgccggtcttgcgggaagtccgcggggagcgaggcaggttgtgaggattcttcactccatgagtaaaaagcatcgtcttccttggcacagggtcatcaatgcaaagggtgaaatcggattaagagatgaagagatattttctgtacagaagctgtctcttgaagctgagggcgtagcggtcacgtcagacggacggatcgatctcaatttatacgtccatgatccgaatatgtaaaaaacctgccgtatatatcggcaggtttttcagttatatgctgcaagccggccagaaaggttttgccggatataaggccattcctcccgaaggatggagtagtaggcggtatctctgaggccgccgtcgacagccggaatatgcgcgcggcggatcccttcaaattgggcaccgatccgcaaaatcgcagttcgtgagcgctggttgcgaacatcggttttcagcgtcaccctgacagcttgccacgcgtcaaacgcatgggtcagcaacagaagtttacattccgtattgacaccggtccgctgtacggcagaggcataccatgtgctgccgatctcacacacttccggggctgcgtccgccggccgcgtaaacacttccgcatccataaaccgcgtacttccgacgattcggtctgtttcaagattccgtactgcaaatggcaatgcaagtcctttttcataatcggaaagcgtacgttcaatataacgctttgtttcttcgattccgtcaggaacatgggtgtaagcgtaagtcgtcctattttctgaagcagcttcacaaagtgcctgagtgtgatcaatcgtcatcggctctaactgaacgagtgaccctttaagaatgacgggcttcagcattcttatcacaacctttttttatgaatggatcaagtatagtcgagcggcttatcattcaaaagggccaattttaaattaaaatggcatgtcagtgaaatcctcgcttcaaacttatgcatacattcaggaaaaaagcggaaacctttatgtgaagaggtgatgggcatggcatatgtgttatcggtcggaaccagcattccggaatatcatgtctcgcaagaaacggcggcggattttgcgagagggatgtttgccgattcatttaaggatattgaccggctgttaaaagcctttcaaaacggcgaaattgaatcaaggcagtttgtccggccgattgaatggtataaaacggcgcggggtttttcagaaaagaaccggctgtatacggaagaaaccgttaagcacagtgcggatgcggcacttgattgtttaacaaacccggattgtttaacaaatccctttccttatgaaaaagtggatgcgatcttttttatttccagcaccgggctttcgacacccagcattgaagcgaaagtgatgaatcagctgccgttttctgcgaaaacaaaacggataccgatctggggcttaggatgcgcgggcggagcggccggcctgtccagggcgtacgaatactgccgcgcatatcctgaagcatacgtgcttgtcatcgcggctgaactctgcagcttaacgtttcagccgaacgacaagtcaaaaagcaacttaatcggaacttccctgtttgcggacggaattgccgcagtactagtcggaggagaaaaggcgaaccgaaacgacgtcaaacagccgcttcttccgcggatattcgccactcaatcggtgatgatgccggatgcggaagatgtgatgggctgggaattcaccgacagcggttttcaagtcattttttcaagagatattcccaccctggtttcacagtggctgaaggacaatgttgatgaatttttaatagaatatggtgtcggtcctcacgacattaaaacctttcttgcccatccaggcgggaaaaaggtcattgacgcctatttaacgagtctttcaatggacaccggtcagcttgaggcatctcggaaggtgctgcaaaaacacgggaacatgtcttccgcaactatttttcatgtgataaaagaacagttgctccgcggccggcagaaagaaaacgaaaaagggctgatcggcgctctcgggccgggattttcgtctgagcttttgctgttcagctgggaaaagggggcttcttaatgttttggctgtttatcatgctgcttgcggcccagcggattgcggagatgatcgtggcccggcgcaatgagcagaaggtgaaaaagcaaggcgcagtcgaatacggagaaggacattatctctttctcgtcctgatgcacgtgctcttttttgtctctcttacagctgaggtggcggcgtttcaaaaaacgctttctccaaggtgggccgccattatatgtattattttatttgtacaggggatcaggtattgggctctattatcattagggcggtattggaatacgaaaattcttgtcgtgccggatgcggagcttgtcagaaaggggccgtacaggtggatgaagcacccgaactacgcggtcgtcatcttagaatttatttttctgccgctgttatacggagcgtattggacactgtttctcttttcgattctcaatgcctgcatgctcactgtaaggattcgcgccgaagagaaagcgctagaagaaaacaccgcaaaatagagattgaaaatcattctcactcatgataagatgtaaatatgaaaatgattctcattcaaggtggtgccgaaaatgacaatgttatttttatttgcagccgtttgtacatacagtgttttaattggtttcgtattgaaaaaagtttcgaataaatcgatgtcttcttaaacatctgcggtttttaatgccgcgggtgttttttctttatcagctgccgatatcggcggcttttttacgtttcctgaagaaaagtgggccattcttgtgtaaaatgggggagaggtttttttcagagctttctaaaaatgaaaacgtcatttgatgcgacagacacaaaggggttaagacacatgacagaagaagaacgccataacagggagattttcagcagaacgggtgccttatacgtacaattattggatcaccaggatgaaaaacgggccgatcagctcgcggccattatgaaaaaagcggctgatgaagaggtttatatcgcgtttaccgggcattattcggccggaaagtcctctttattaaacacattgctcggtgaagacatactgccgacaagcccgattcccacaagcgccaacctcgttgtcatccggcacggtgaagataaagtcgtgcttcatacgacggacggggcttatgcagaaattaaaggaagttacgataaaaaacaagtgcagcaattctgtaaagacggtgagcaaattgaaacggtggaagtctatgccggctttaaggagtcagagccttatgcggcctacattgacacaccgggaattgattcgacggacgaagcgcattttttatctgccgcttcggttctccaccaggctgacgctttattttacgtcgttcattataatcacgttcattcagaagaaaatatgctgtttctcagctccatcaaagaccgtattccgaatttgtttctgatcgtcaaccaaattgacaggcatgatgaaaccgaaacgaagtttgaagagtaccgcaggcaggtggaagatatgcttgaaggcgcgggaataccgaaagaatcgcttttctttacgtctgtcactgagcctgaccatcctttaaacggcatggaacagctgaaaaaacatctgcagaagctgaaacagcaggcaaaaacaaatttatggtccttaacggagagaaaagtcgcacacttagtcaaagagcatacagagatgctcgtaaaagatgataaaaacggaagcggagagcagtttgacaaacaagaagcacttgtccgttctgttgaagatgagcttaataaagccgttcaacaggctgaaacagcagagaaagacatcagaaaagacgtgcagaacatattgcaaaacgctaatttgacaccctttgagatgagggagcttgcatctgcttatattgaatcacagcagccctcatttaaaaccggattattcttttcaaaagcgaaaacggctcaggagaaagagagaaggcatgctgaattttttgccgatattaaaaaaagaacggaaggggaagcggattggcacattatcgacacatttacgaaagcggccaagcggtatgaagcggattcggacgaactgatcaagaaaatccaggcgtaccgcacaccgctttctgatgatatcaccgctcaggcccttaagcagggagcggccttttcatctgaatacgtattaacttatacgaaagacctcgctgagatgatcagaagggaagccaaaagacagacagcggaactcattgagaagcttaccgcttatgttcaggcaaaaaacggaccgctcattgagaacttgaaaaaccggctcgaaaaagaaaagaagataagggatgagctcgcgcaatcggcaaaagaagaacgcaatgccttggaaaaagcagcccgggtccgcgctttgtgggaagaagaattgacctgtgatacgggaagcggcgactggtatacgcgaaaaaaacgccttgcaaaagcgcccgtccaaaaagagaaaccaaaagagactgtacagtatgaagtaaacaaacccgaaaaaaatgcgatgaaggaacttcctataaaagagcagactgatcggttctatgagcttgccgggattcttgaatcctcgagcatattaggaaaacaggcagaagcctttcgaagcaggattgagcggcttgaaaaccgccagtttaccttggcgttattcggcggattcagttccggtaaatcatcatttgcaaatgcgcttgtcggtgaatacgtgcttccgtcatcaccgacgcccacaacggctacgattaacaaaataacgaaaccgcaagccggcaaaccgcataaatctgcggagatcgtttttaagacggaggaggatctggacgctgaaatgcttcagctgactgagctgaaagacgctgatgtaaaggggcgttcactgaaagagagatggaattatgccattaaaaaggggaaagttccggatgaacttatcccggtgattcagacgatgctgcaggcgtttgatacgtatgaagaacagatccgtcaaaggcagacactgacggtgccggtggaagatttaaaaccgtatgctgccgaagaaaaaacggcctgctgcgtaaaagaagtcaccgtgtattatgattcgcctctcacgcaaaaaggcatcacaattgttgatacgccgggagcaagcagtataaacaagcgccatacggaacttgcctttcaatatataaaagatgctgacgcgttcttttatatgacgtactatcagcattctttttcaaaaggagacaggtcttttctgaagaaactcggcctcgtcaaagaatcattcggcatggataaaatgttttttgtcattaacgccgccgatctggccaaaaccgaaagcgagctggaaaccgtcaaagactatgtccgctcagaactctcaaaagagggaattaaccggccaaaattatatcatgtctcaagtaaagaagagcttgcgggtaaaaaagcagctttttataacaggttctctgatgtaagaaccggacttgagcactttattgaggaagatgtaatgagggccagctgcgcccagctgaaaacagaggcggacaaattgtgcgatatggtggaacagcttcacgaatctcttcaccagtcggcagaagaaaaagagaaaaagaaacagcatctggagtcttcctatgaaaaagctctcgctgacatttcaaagcgccgtacgtctgaggtcatcattcgaaaagtgatgaaagatacggaagaacagctctatcacattaaacatcgcctgacattttatgcgaatgatatgctgaaaaccgccttccatccgggccttcaaaacggcgattggaaacaaaatatagcagcggcgctgaatgaagcgctcaaggaattccgttttgaatatattcaagagctgaaaacgctcgatatccggatgaccggttttattgagcgccatatgactgaggaatggatggaaaactgtcagaagaagcttatggaagacggagatttctccatttatgtgagcgccgaaaacgaatttgccgttcagctgaaagaagtcgctccggtcattgacgtctcggcattcacacatcacataaaagaagttaaatcgccgaagcagttttttgaacagaacggaaaagcagcgtttgtagaagggctcaggctcagcctgcaaaaagtgacagaaaagtggcttgagcaggagaaagaaagcctttcagagcgatatactgagcaggtgcgccgtctgcaagaagacatggcggataaaagcctgtcccagatccgcgagcagcgggacacttatttacaaggtcttgcggaaaatacgagtgcaagggaaattgaacacctttacgaagccgaaaaagcatggaaaaagaaagatgaaatgctgaaaatttaaaaatccggttggcgggcagataacagtcgtggtagactaaaatgaaaaaagcgagatgaaaccttttatgtcagaagtccataaagcaatttcagcacattccgcaaaacagcatcagcacgtcaaaacatttgtacagcttgactaccagcgtgaacaggccattgaagaagccattgtaaaatgcagacagaatgaaccgttcacgacagatgccatcaatggcattaccgcaaaaatgaaccagctggcgaaaaagggcatcgtgccgcaaagacgattcgtaagtgaagagatggtgaaagaattcgtcagcagacagtaatggatgaacctgccgcgtgtgtcatcagcgcttgctgtacatactatccgtatcttctctaaggggggatatgacaatgggcagaacaaaactgggaaacagaaatgttcagcagaataacaatgccaaaaagaaaaacggtttcggacagaaatttgattcttatgccggccgtgaagctgaaaagctgatggcaagcaataaaagacacggtgagtaacgtgacggcagcatcttccaaatggggggatgctgtttttttaccgccttctttggtaaaataggaacattgaataaaaaaaggagtttcgatatatgaataacaaattactgctcgtggacggcatggcgcttttgttccgctcgtttttcgcgacggccgttcatcgcaattttatgataaatgaaaacggaatcccgacaaacggcgtcaacggttttttaaagcatctcattacggcggttgatacgtttcagcccacacatgtcgtctgctgctgggatatgggaagcaaaacgtaccgcaatgatttgtttcaagattataaggccaacagaagcgaaccgccgcttgagctgattccgcaatttgatttagcgaaagaagcagcgcgagagctcggttttttaaacatcggcataaaaggctatgaggcggatgactgtatcggtacgctttctgccctattttccggagaagcggaaattacgattgtaacgggtgataaagatctgcttcaattgatgaatcatcaagttcaagtagcgctgctgcaaaagggtatcggcaattataaggtatatacagatgagatattcagagaagaaacgggggttccgccaaaagcgctgattgacattaaggcgctgatgggagacacgagcgataactatcccggcgttaaagggatcggggaaaaaacggcgtacaagctgatccgtgaatacgaaaacatagaacggttattagaaagcctcgctctcttgccgaagggccagcaaacgaaaattcagcaaagcttgaaagaattggagctgtcaaggcagcttgctgaaatacattgcgaggtgccgttagtctgtacgcttgaagaagcgattttttcattgaagatggaagaagcatccttaatgctcagacgccatcagataaaaggaattgaaagaatgctcgaaaagctgaacgccagagagatcagctgatccctctagcgttttgtattgcttttttttgcgttgttttcaagggctgatttcgggtctttatgcgcatttccttccatatttccctgaggattcacgcccccggtctgccggcctttattttcttttctcatagctgttcacctcatttgtaggatgaacagtgaaacgcaatttcattccggttatttattcagccggaccgctttttttgcgagctgatcggctgtttggttttgtctgccgggaatccacttaatgaaaaacaatggaaatccggcctttaagcggatgatttcatccacaaacggctggaaagccttgtttttaaccgcttcaagttccgcggcccgctccacgatatctgaatccgtccggaatgacacggactcaaatccgcgggcggcacacagcttcattccttcaattaaagcgagaaattcagcttcctgatttgaatggtcgccgatcggaattgagaaagattctgttttcccgtcatgtttaataaaaataccgataccggaggggcccgggtttccggcgcttgcaccgtccacgtaaatttcagcaggcatcatccgtcactctcccttcggtgtcattcgttttgccgcatacgcataagggacagaaatgagtgataccgcaaatttaatcaggtaagtcgaaataaagatgctgaaccatacgcccgcggaataaacgccgataaaggccacggcagtgaagataaatgtatccagcagctggctgagcgccgtgcttccgctgtttctgagccagagaagcctgtctgaaggaaagattctccgaatggctgaatatacataaacatctatcgtttggctgaaaataaaagccaagaggcttccgagtgcaacacgcggcagaaaaccgaaaatcgtctcaagggcaggctgcgcgatatctgacgcagccggtttatataaaagagccccctgcatggcgcatgtcaaagcgagcaaagtggaaaagccgagccagacggctttgcgcgcttctctgggaccgtatttttcattcagcacatccgttgcgaagaaaacggtgccgtacatgatatttcccagtgtcgccgtaagcccgaacagctcaactgttttgacaacctgcaagttggcgcacaccgtggcgaaaccgatccatacgaataggcccgttttgccaaatcctttataaaacagaagaacaatgataaaatgaatgaccgcaaataagatccataacacatcgttaaacaaaacctgctgacttcctttcaatttgagaatggtttgattatagcacacgcccgtcaactaatgaatggtaaggtgatttcaatgaatcttaagccgtatatcgaaatagaagcaaaaggaacaggccctgtcgcgtttttttccgaagattggctgaccgttccgaaagcgcgcatgcttgcaagagaagtcagccgctttccttatataaaagacatttattttgaggatgaaaaaggcgcgagctggacgcttaaagaattagaaaagcttactgaagaacttgcgtacgaacctgacgacattacagtgtatttcgacggcggctttgacaaaacaagcggacgcgccggactcggaattgtcgtgtattattctctcggcggcaagcggcatcgcatacggaaaaacaaaagcttaacgcttcagacgaacaatgaggcggaatatgccgctttgtacgaagcgcttaaggaagtgcaggaacttggcgcaagcagaaattcaatcacgataagaggggattccctcgtcgttttgcatcagcttgacggcagctggccgtgttatgatgaaacgcaaaacgaatggctggataaaattgaagcgctgctcgaatccttaaagctgacaccgacatatgaagccgtaaaccgaaaggaaaatcaagaagcggatgaccttgccagaaaaattctctcggaccggcagattgaaagccgcataacattagaaggtaacggagatgactgatattggataaaaaaagcatttataaagaattgacagagcttcaggatgaatattgcaaagactgtttcgtaaaaaagcatttccgcaaagagtttggaaaaacgcacgctcattctttctgcatcaaccaatgcacggtgggggagaagctgaaagcctacggcaaggtgctgacaaatcaataaaaaataaaaccgcagcttctgcggttttatttttcgaattcatcaagctgatgctggcaatcgtcgagaagcattcgctgcttttgcagaaaatcctggtcgagagcttgcagttcactggattgtgacatcgttctggcatcctgaatcgcctggtaagcagactccaccaaagttgaactttggccccgggtagccgctcccgttgttttctgggccgtttccaccgctaattcaagctggcgtttatccgtcagtccgtttggaaaaaattcagagtccattaaaaaacacctccgcaaatagtttggagattttttttagaaatatgtacggaaaatagaaaaaaatatagaaaataagccgatataactattgaacctgattaattagggcttatttactattattcagggtatcttgggagagaagggaaaaaccagccgtgaatgataatgatttaaaaacaatccttcagcagacatttaaagaaatatacggtgatctgggaagtttagcggaaatggcgaaaaaaggaatgccgtcaatggagaaacaaattgaagaaatcgagcagcgctgtaagcagaatcttgtcgcaattgagattcagacggcaatcaaataggagaggcatacgcctctcctctatttgtcatctgatcaacatgtattgagtttagagttttacaacattagaagcttgaggtccacgattaccttcgacaatttcaaaagaaacttcttgtccttcttctaatgatttgtatccttctccttcgatagcagtgaagtgaacaaatacgtcgtctccgccttcaacttcgatgaagccgaatcctttttcgttattgaaccattttactttaccgttttgcatattgcttaattcctcctagtactgtagcaccttcgtgctaaaaaaaattttgtcatcatccaaccgtacgtatgtaaacgttgttaaatgatggttcaactatacaccatatgggagcgggcgtcaagcggccgctccctattttttatctttatttttccagtaacaaagcttaaccggaaaaaaacaaaaagcacacgaatcgttcgtgtgcttttcttttacgataatgccatatccgccttcccggccatcatttcagattcttttataatgtcctgcaaaatgacttcagaagagttggggaggtgaaggcttttaatattgctcttcatccggttcagcttctcctcatccgcaagaagggaggtgacagactctaaaatttcttcgtggcggttgaccacgacagccgcaccgcgatcttcaaagaaaatggcgttttccttttcctgtccgggaaccggtttgtacaaaataacgggtacgccgatcgccgtcgcttccgtcagtgtgatgccgcctggttttgtgatcatgcagtccgtaatacggaacagctcgtcaattctttctacataacccagcactttcagccggtcggcattgtcaccttccaagctgctgagggattctttcagcgagctgtttttgccgcataccaccacaacctgcacctgatcgtcatgaacgagattttcgcacagttcttttacgtttttcagcacaccatgcgctcccgccataataagaagaacttttttgtcgggagagagattgtattttttataaatcggctctttcggcatcgattcctcgaattgaggcctgatgggaatgcctgtgatctttacgttgttcgggtgagtgccgatttcaatcagtttttcctttacgtaatctgtggcgacataatatttatcaacattttcatgaacccagattttgtgaaggcagaaatcagtcattacgttgaacgtggggatcacttttccggttctccgtctgtattccggtacgacaatcatcggaaatgtattgataataatgtccggcttatgctcttcgacgagctggcctaaacgtttatttcccattttaaaataaatattgaatttgcgtttattatagattttgtcaactccgtaataaaacaaacgataaaactgtttcccgattgagaagctttttaaataaaggtattgagtaacctctgaaacaatcggatttgactcttgatacaaattggaaaccgtcacatctaagccgagacgcagacattgttcgtagagcgttttggccacttgaacatgcccgtttccgtaatttgcagtcaaaattaatacttttttattggtattcaagtaaattcacctcaatgtaatcaacaacaagcaagcttcatgcatcgtaaggagttattgtctatagataaacataacacaagtgcatcattttataataagcgcgccaacatatttaaactaaatttaattgatatgttccattattttaaagttttgttatacgcatactgaatcaagagtattttatcatatttttgtcaccgtatcacttaaaacaaaaattaatcccattcatacggagtttcctgatatacgtaataattcagccaattcataaacaataacgttgcatgagctttccagcggttaacaggttctttcccgccgggcgcaaaatagtgcttaggagcttctacgtttgaaagatttctctctatgtctctctcatactcctgaagcagcgtatcggtatcatattccggatgacccgttaagaaaatctgtttttcgtcttttgaaacgattaaacagacccccgcttcctctgaaacgctgagcacattcagatccgaagccgattgcagctgctccgtattaatatctgtatgccgtgagtgtggcacatagtatagctcgtcaaatcctcttaccaatctctcatgttttttaagaacggtatgctcaaacacaccgaagatttttttcggcagctccactttctcaatgccgtaatgatagtataaaccggcttgagcgccccagcagatatggagtgttgaagtgacgttcgttttgctccattccatgatttccttcaattcttcccagtaagaaacatcctcaaacggcaggtgctcaatcggagccccggtaataatcattccgtcaaaccgtttgtggcggatgctggaaaaatccgtataaaattcatccagatgctgccttgccgtattttttggagtatgtgtgctcggaattaaaaacgtaaagtgaacttgtaaaggtgaattcccaagcatcctgaggagctgggtttccgtttggatttttttcggcatcagatttaaaatcacgatcttctgcggccggatatcctgatgaaaagcccggctttcatccattacaaagatgtgttcactttcaagcacctgcttagcgggcaggtgatttggtatattaataggcaacatgccacctccgttattccccgttaattttcttcattatagaaatttttaagccatttttcaatccatcccggcgtaataaaccgtatttaacgcataatgacagggataaaagcggcaaatgggtataaattcggagcggctcttttattatgacgggtaaagagccgtttggttcctcgaaaaaaacgttttccgttaagtggaaggaaaaagcggttaccgtttgttttgcagtgtaaaacaggtaaaataaatgaagaatgtaaaaaggagggccgcagatgacaatttacgatataaacgtacggaccataacaggcgaagacatgacgctatcggcttacagaggcaaggtgatcatcattgtgaatacagcaagcaaatgcgggttcacatcccagctcaagcagcttcaggagctctatgatacatatcgggaggaaggtcttgaaatattgggatttccctgcaaccaattcatgaaccaagaacctggaaatgaagcggaaattcaagagttctgtgtgaaaaactacggagtcacattcccgatgtttgcgaaagttgatgtcaatggggcagacgctcatcctctcttcaaatatctgacggaacaggcgaaggggatgctcggcacaaaagcggtcaaatggaatttcactaagtttatcgtggaccgaaacggtgaagtcaacgggcgtttttcaccgaacgtcaacccaaaagagcttgaagatacggtgcagaggcttttggcccgataagaggtgatacggtgaacgaaaaagagcagctggaaagcgtcaggaattgggtcagagaaaagcttatcaatgaacgtacgggccatgactggcttcatatttcccgggtcgcaacactttctgtttatatggcaaaagaagaaggcgccgacttatttatcactgagacggccgcgctggttcatgatctgattgacgccaagctcgaaaaaagcgaaaggctgacggcaggcgaagtgacagaacggctggctgctttcaacattgcggctggctccattgaggagatcgcggatatcatcacgagaatgtcattcagacacagggaactgctgataaagcggccgctttccttggaggggaaagttgttcaggatgcagacatgcttgatgcgatcggcgcagcgggcatcggcagggcttttatgtttgccggcgcgaagggtcacccgatgtacggaactcaaacaagtgtgctggcccatatagaggataaattaatcaagcttaaaggcttaatgaatacaaaagcgggggcgggtttagcagaggagcggcatcaatttcttttgcagttcgccgcccgtatccaaaaagaggccggcatcggcaaaagctaagcggcgcaatagaacgcttgtgccgactatgttagaataagtgtcagattgcgcataggaggaccaatatgaagattaaatcaatagaaccgacgccgagtccgaacacgatgaaagtgattttgactgaagagcttccggcggggaaaagcaacaattacaagcctgatcaggcagatgatgctccggccgtcgtacgtgatattttaaacattgaaggagtaaagggtgtttatcacgttgccgatttcctggctgtggagagaaacgcccgttttgactggaaggacattctgcctcaggtccgttccgctttcggaatggaacatacggagcagtctgagagccgttctgaacaggaatcgttcggtgaagtgaaggttttcgtacaaatgttcagcggaatcccgatgcaggtcaaattgacggacggcgaacgtgaagagcgcttcggccttccggaacgtttccaagaagccatcttaaagctgcgttccgaagcttcaaatgttgtatttgagcgggcttggaaagaacaaggcgtgcgcttcggggattttaccgaaatcggacacgatgtcacagaagagcttcaggccgcctacagtgatgagcggctcaaacgcctgacagaagcagccgtacagcaaaagggtgaggccaaaccggcagtgcagcggaaagcttataaagtgactttggaaatgctcgatgatgaagactggaaacagcgctatgcccatcttgagcaaatggatccggatgaagacgatttaccagtattagaaaaggcgctgcatgatccgaagacttcgatcagaagacaagccgtcgtttatttgggaatgatcgaaaagccgtctgtgcttccgctgttatacaaagcgcttgaagacaaaacggtgacggtcagaaggacggcgggtgactgtctgtcggatctcggcgatgcgagcgccatcccggctatgacgaaatcgctcagtgactcaagcaagctcgtgcgctggcgcgcggccatgtttttatatgaagtcggcgatgaaagcgcactggaagcattaaaagcggcggaagacgatccggaattcgaagtcagcctgcaagtcaaaatggcgattgaacggattgagcacggagaagaggcgaaaggttcagtctggaaacagatgactgaaagcagaaaaaaagaacagttataacaaaaaggtgcgccatgcaccttttttatttgaattcactttttataaaaattatttagaatattgttgaaaaatgattcaaaactctatatagtaagtacaatattaattgttggagggtttttatcgaaatacagaaagaatagaaaagcgagacagggcaaagacgctgtaaacaggtaatttgcagaacgcgccctagaataaactgaaaattttaaaaatagtgcacagtctaaaaacagtagggggatcaccatggcagaattacgcagcaacatgatcacacagggaattgacagagcgccgcaccgcagccttcttcgcgctgccggcgtaaaagaagaagacttcggcaagccgtttatcgcggtctgtaattcatacatcgatatcgttcccgggcatgttcacctgcaggaatttggaaaaatcgtaaaagaagcaatcagggaagcgggcggtgtgccttttgaatttaacacgatcggagtagatgacggaatcgcgatggggcatatcggcatgagatattcactgccgagccgtgaaatcattgccgattcagttgaaacggtcgtctcggcgcactggtttgacggaatggtctgcattccgaactgcgacaaaattacgccgggaatgctgatggcggctatgcggattaatattccgaccatttttgtcagcgggggccgatggcagccggccgcacaagcgacggccgcaaaatttcgctttcttcagtatttgaaggcgtcggcgcatatcaagccgggaaaatcggtgaaagcgacctgcaggagctggaacagttcggctgcccgacgtgcggatcttgttcaggcatgtttacggcaaactccatgaactgtctgtctgaagcgctcggtctggcgcttccgggaaacggaacaattctggcaacttcaccggagagaagagagtttgtgagaaaatcagcggcccaattgatggagaccatcaaaaaagacattaagccgcgcgatattgtcaccgaaaaagcgattgacaacgcctttgcgttagacatggctctcggcggctcaaccaacacagtgctacatacgcttgcgcttgccaatgaagctggggttgagtactctttagaacgcattaacgaagtggctgaacgggtgcctcacttatcgaaattggcgccggcctcggacgtcttcattgaagatctgcacgaagcgggaggagtctcggcggcccttaatgaattggcgaaaaaagaaggggcgcttcatcttgacgcgctgactgtaacaggccgcacactcggagaaacaattgcgggtcatgaagtaaaggattatgacgtgattcatccgcttgacaatccgtttaccgaaaaaggcggtttggccgtcctgtttgggaatctggctccggacggcgccattatcaaaacaggcggcgtacaggacgggattacaagacatgaaggccccgctgtcgtctttgattcccaggatgccgcgcttgaaggcattataaaccgcaaagtaaaagaaggagatgttgtcattatccgttatgaagggccaaagggcggaccgggcatgccggagatgcttgctccgacgtctcagattgtcggaatggggcttggcccgaaagtggcgcttattacagacggccgtttttcaggagcgtcccggggtctttcaatcgggcacgtatcacctgaagcggctgaaggcggcccgctcgcattcgtagaaaacggcgaccatgtcatcgttgacatagaaaaacggattttggacgtacaagtgcctgaagaagaatgggaaaaacgcaaggccgaatggaaaggcttcgagccgaaagtaaaaacaggatatctggcccggtattccaaactcgtaacaagcgccaatacaggcggaatcatgaaaatataaaacagaggcctgaacaattgaattccggccccctctatagtatccttgacttcatataaggatttttagagggggcttttttatgtcaatggcttatgaagaatatatgcgccagctggtcgtgccgatgcgccgtgagctgacgggtgcgggttttcaggaattaacgactgctgaagaagtagaaagctttatggaacaggcagagggcacgacattggtcgttgtcaactccgtgtgcggctgtgcagccggtctcgcccgtccggctgcgactcaggctgttttacagcatgaaaaagcgcctgatcatacggttaccgtatttgccggtcaagataaagacgcaactgcaaaaatgcgtgaatattttacggggcaggaaccttcctcgccatcaatggcgctgttaaaagggaaagaggtcgttcattttattccccgccacgaaatcgaagggcatgacatggaggaaattatgaaaaatctgacggatgccttcgatgcgcactgctgaaatgcccgaattccgggcattttctttttggagaaaaagatgatcacaacgagttacagaccaagcgaatacacgatacacacagcgcagtcactcagtgtcaggctgggtgacacttactgcagccgcaataaacagcccattgaaaaaatgctggaacgagccgctagcgatcttttagtcatcggaaaggaacggttcgaactttacacgaagcaaggggagaagttcttttttcacccgaatacagcgatgttccgcgcaaagcggtttttgagaggggaagccgagccgttgttaaaagcagccggattacgcgagggggattcctttttagattgtacgctcggcctggcatccgatgcgattttggcaagcctggcagtcggaaaaagcggacaagtcatcggcctggagaaaaacaagcttgtctcattgcttgtagaaacaggacttcaaacgtgggaaaccggaatggagcagctccaaaccgccatgaaacgcattcaggttaaacatgccgactgcgccgattatttgcgggagcttcctgattcatcggtagatgtcatttattttgacccgatgtttcacgaacctgttgaaacgtcagacggcattgcaccgctccgcgcgctggcagaagagggttttaacgaagagtgcatcacgcaagccgtccgggcggcgaaaaaatgcgtagtgcttaaagaccattggaaaagcccgcggtttgaacgatacggcttcaaggtgctgaaaagaaagacggcgcttttccacttcggtgtcatccatgtaagctcatgatatcatgggcttctttttcgttaatcagtgatttccataacgacaaaataaagcagcgtgagaagtgatacagtcgcaaataaagcgttaatcatctcatcccctcctttttctccttcttattgtaagcggtttatccactcggtcacagttaccaatttcccatattgcatgataatacggtgccggacatgacgccgcgctttaatctatgctaaaataaaggaaaagaggacaataaaacagaggggaacaatctatcatgaaattgtggatgaaaaagacccttgtggttctgtttaccattgtaacgttcggactcgtgtctcctccggctgctttgatgacagacaagccttcaggacagtcgagcagtcttgagcagaatgattacaccgctttttatgatgaacacgccctgacgggagaagcgaaggcagggcgggagcctgaattactgtttcaatcgtatcagcagcagcttctcggtgatgctgaaaatcaatcatttttaaaattcggcagcaaaatctctccggtcattgaagatgattacagaagtgaaattctgccgaaaatcgaagatgtcatcacaggacatttagccaagtttcaagatgatgaagcgtatcaggatgtggttatttccagtaaaccgtcggccggaaaaactgaaaaaatttttcatgtgtataacaggctgacaggtgaagatcttttaaggttccacgtccgccgggatcatcctccgcaagacggctactggtttaattttcattaccataccgctgaagacggatttcaatcacatcatgagctcggcagcatttactgggaccgcaatacgccgcctgactggatgagcgtgtaatagcgagaagaaataaaaaaatcatttctgagaaattttgcagaaatgattttttattgtgttacactactaaaagactactttaaaaggatgaaaaaaatgaaacaatataaagatttgtgccgtcatgtgttagaaaacggagaaaaaaaaggagaccgtacgggaacgggtacgatcagcacgttcggctaccaaatgcggtttaaccttcaggaaggtttcccgatgcttacgacgaaaaagctccattttaagtccatcgcgcatgagctgctttggtttttaaaaggagatacgaacgtccgctaccttcaggaaaacggagtccgcatctggaacgaatgggcggatgaaaacggagaactcggaccggtttacggctctcaatggcgttcgtggcgcggagcggacggcgagaccattgatcaaatctcccggctgattcatgacatcaagacaaacccgaattccagacgtttaatcgtcagcgcctggaatgtcggcgaaattgatcatatggcgcttccgccctgccactgcctgtttcagttttatgtcgcggacggaaaactgtcgtgtcagctttatcagcgctcagcggatgtctttctcggcgtgccgtttaatattgcgtcttatgcgcttttaacaatgatgatcgcgcatgtgacgggacttgaaccgggtgagtttgttcatacattcggagacgtccacatttaccaaaaccatgtggagcaggtgaatttgcagctgacaagggatgtccgtccgctgccgaaactgcggtttgcgcgaaatgttgattctatttttgattttacgtttgaagactttatcattgaggattatgacccgcatccgcacataaaaggagctgtcagcgtatgatttcgtttatttttgcgatggatgagaaccggctgatcggaaaagataacgatctgccttggcaccttcccgatgatctcgcatatttcaaaaaagtgacgacgggtcacaccattgtaatggggcgcaaaacgtttgaatcaatcggacgcccgcttccgaaccggcggaacatcgttgtaacctcacgggacgaatcttcattcccgggctgtattaccgccgactcggctgaggaagtgctcaagctgatcccggcggatgaagaatgctttgtaatcggcggtgcccagctgtacagtgcgctctttccctatgcggacagactttacatgacaaaaattcaccatgtctttgaaggagaccgtttttttccggaatttaatgaagctgaatgggaattgacctcccgcaaacagggagtaaaagatgaaaaaaacccttacgattatgagtaccttgtatacgagaaaaagaattaagcagggggacaagaattgattcgttacggctgccttgtgatgtacgttgtatttatgttcatgaaaaatattcaggaatatatcaatcaaaaagagcttgacccgcggctctcttttcaaaaacagatgaggctggtgtatgagcggccgaaagcctttatgagaggctgcattgacgtgtcgggatcggcaatcggcattcatcatgatcagccgataccggacggccccgtattgtatgtgcatcccagattgcgcccggctgatcttctgctgcttgcgggacatcttgaagagccggctggttttatcgctggcgagaaagctttccggatgccgtttctcggaaattggctgcgtctgatgggtgtcatttgtggcggagacagccgggatgcagtgcttcaggaggcggaagtccggctgcaaaaagggcaaagtctgattctgtccgaagacggcaaaatcaatccggaggaactggcccttcgtttcgatctcccgattgtgcccgtcagcacttcgggaacagaccggctgctgcggggcaggttattgaaacggctgaaaccggctgatattgaattacatataaagcccgcttattatccggccggtcagaaacggctccgtgcataaaaaaagcacagtctctatacgagaggctgtgcttttttatttcagataaagggaactttgacgcaataaaacaaaatacagaaaaacatcgaggcgctgccgcctaaaacaaaactgtgccaaatggcgtgatgatacggaacttttctccaaatataaaatattgtgccggcggaatacaataagccgccgaaaagaagaaggccgaaaccgggacctgacagcgaagcgtacagcggtttaatggcgatgatgatcagccagcccatcattaaatagacaagcgttgaaaaaatgataaaccgcttcacaaaaaagattttaaacacgatgcctccgatggcaagcgaccaaacaataattaaaagggtcagaccgagcgtccctttaaggggtcctaataaaaatggcgtatatgttccggctattaatacgtatatcgcggaatgatccacaatttcaagaatgtctttcgtttttttatgctggatgctgtgcaaaagagtcgagctgagatacagcaggagcattgaagcgccgaatatggaaaagctgacgatgtctgtcggcgagccgtatttcaccgcaaagataatgagaaaaataagcgccggaatcgacagcaatacaccgattccgtgtgtgacggcatttgcgatttcttcttttattgtgaacaatcaaatgtcctcctttttaaaggatttgtttttgcagtgactgcaaaaaggtcaacccttctaatgtgatttttgttcctgcgcgtcctcggccttttgtcacatagttcatcttttctaagtaatcaagcctgtttctgacttgctggggcgttaatgtcattgtgctgttttcgcttaattcggatatgctccgtctgctggcgggttcgccttttgtatttaagtctttaattgcttccaaaataaacaaaaactcttctttctccatcaatgtcagccgtttttcttttttcttagcggttttcgctttctggctgtttttgatatacggcgggacatgctcgggataaatcgtgctgccggatgctgccgcggccatatagtgcgccgcattttcaagttctctgatgttgccgttaaaggtgtgccgctcaaacagcggataaacggacggatcgatatgaacatgctgccccgaggctgtcagcatatgctgcagaagaagcggtatatcgctttttcgttcagataaagcagggagcggaaggcctaacacgtgaagcctgtaaaataaatctatgctgaacgtgttttccgcgccggtatcgccaagattcgccgtgctgcttgcaatgatgcgggcggaaagcccggcgtccagctcggaaagaaggcgggcctgtaccgagagcggcatgtctccgatttcatataagaataatgttccgcggcgggccctgtttaatgcgccttcagccccgaacagttcatattcgagccgctcttcgctttgactgcagtgaacggtaataaatagttcgctgtttctgcgggatttatgatggatcgctctggccatttgtttttttccggttccgacttcacccgttatgaagaccggcaaatcagataaggcaaattgcgaggccaatcgtttcgcttctgaaaaggtgtgatgttcgccggctagctgataaaaaggatcagtttgttcaattacactcataaattggctccttttggttctaattggtttaagtataacacgtttatgcgatcgaaaatatctttttctcttgtatcggttcatttatttttatttacaaaattaaaataattatcttattgtttgaatattcatgttataatggcatattaaatagggatttaaataagaaaggactctgtaaatgaaaccgttgcttaaagaagactctctcatccaggtaaaagacattttaaaagcgcaccaaaacgtaaaggacgttgtgatacatacgcctttgcagaggaatgacagactttctgagaggtatggctgcaatatctatttgaaaagagaagacctgcaggtagtcagatcatttaagctcagaggggcttataataaaatgaggcagctctcaaaagagcagactgaaaacggaattgtatgcgcaagtgcgggaaaccatgcgcagggggttgcgttttcatgcaaacacctcggcattcacggcaagatttttatgccgtcaaccacaccgagacaaaaagtatcccaagtggaactgttcggaaaagaatttgttgaaatcatattgacgggtgacactttcgatgatgcgtataagagttctgcggaatgctgtgaaaaagaaaaccgcacgtttattcatccgtttgacgatcccgatgtcatggccggacagggaacggctgccatcgaaattttaaatgacattgacgtcgaaccgcattttctttttgcaagcgtagggggaggaggactcctgtccgggatcggcacgtacatgaaaaacatctcgccggatacaaaaatcatagcggtagagccgaagggcgcagcctcctattttgaatcgaaaaaagccggacaagtggttgaacttgagaaaattgataaatttgtcgatggggcggccgtaaaaaaaatcggcgctgaaacctttcaaacgctcgaaaccgtcgtcgatgacgttttgcttgtcccggaaggaaaagtgtgcagcacgattcttgaattatataatcaatgcgccatcgtggctgaaccggcgggtgcattgtccgtgtcagcacttgatctgtacaaagaagagattaaagggaaaaacgtcatctgcatggtcagcggagggaataatgacatcggcagaatgcaggagatgaaggagcgctccatgatttacgaggggctgcagcattattttatcgttaatttcccgcaaagggcgggagcgcttcgcgaataccttgatgaggtgctcggtcctgatgatgacatcacccggtttgaatacacgaaaaaaaataacaaaagcagcggccccgcattggtcggcattgagcttaagcatcgggaagattacggcgcgctcattgcccggatgaatcaaaaaggatttcattacgtagaggtgaataaagatcaggatctgttccacctgttaatctgactttttttagaacggccgcgcaaaatgacagacacgctttctcagattgtatataataaaaagaaaacaatcgaaaaagaaggattgatatcttgttactcaaaagcctagagttcaaacgacaggacgggattcaggtaaaagtgacagaaataccggttatcacggaaggtgaacaatatttttttcaaattcatcagcaccttgagctttatttgagagaagtttttgcttcacaaagtgtgagaacagtgtattcattccgacaatatgtcaagcgccgtatgaagtggaaagattatgaggccgttttcagccaagagattttaaaacataacgcataacggtgcacattccttagcgccttccttttgataagggagggtgcgggaatttttttatgatgaacgctgtaagcgttttatctatgggggaatggaaatgaaaaaaatgaaaagcttcgctgccgtcttttgtttgctgctcttgtgcgcctgcggggggaaaacgataaaagacccgctgaactatcagattgagccgttttcatatcagaaccaagacgggaaaacagtgtcactgaaaagcctgaaggggcatgtctggattgccgattttatgtttacaaactgtaatacagtctgtccgccgatgacggcccacatgaccgaactgcaaaaaaaactgaaggctgagaacctggacgtgcggattgtgtcattcagtgtagatcctgaaaatgatacgccgaaacagctgaaagcctttgcttccaaatatccgctttcgcttcgcaactgggattttctgaccggttacagccaaaaggacattgaagattttgcgctgaacagctttaaagcaatcgtcaaaaagccggagggagaggatcaggtcatacatcaaacttctttttatttagtcggacctgacggcaaggtgcttaaagattatgacggcgtgcagaaggttccgtatgatgatatcctctcagatgtcaaagcggctgaggagctcaagtaaactggcagattagacattttcaaaactgaaaaaacatgttacactttccactagtagacggggaaggagcaaccagattgaagctgcgaatgttctcattgatcgccggactggctttgcttttatcagcttgttctgtccagcgcaccggttctgacgctgaagaaccgaaaacgaaagatcatattgtcatagctgcggtcggtgattcattgactgaaggagtaggagatcctgacggttcaggatacgtcggcaagacagcggagtctcttaagaaaaagggacatgtgaaaacggtagatattaaaaattatgcggtgcagggcgacaaaacgtcagacctgctgaaaaagcttgataataaaaaagtgcagaaatcattaaggagcgccgactatatcttttttaccatcggcggcaatgacttaatgaaggtgctccgccagaatatgatgcagctgacggttcagccgttccaaaaggaagagaaaccttttgaaaaacggttcaagacgatcatttcaaaaatccgcaaatataatgaaaacgcagagctggtgtatgtcagcatgtataatccattcacgtttacgctgcctgaattaaaagaaattaatggggttgtgacggattggaacaagatcgccgcaaaagagctggaaaaagatcctcacgccgctgcggtgaatgttgaagacttgttcagtcaaaaaagcggcagcagacggatttcaaaggatgatgattttcatccgaacgcaaaagggtatgcactcatcgccgaccgattatacggcatcatagaaaaacaagggttaccagcagaatagggtgaaatgatgaaaaaatggaaatcgctgttttttgttcttctcgcactcaatgtgattgccgccgcggtaattgtgacattattggttatgccgggagaacaggcgaaaatacaagatcagacaaaaagtgagtacggctttcatatcacaagctccaaagaatcacttgccaggtttgtgaattcgtacttaaaagagaaggcatcgaatcagcttgactacaaagtggacatcaataacgatgtgcacgtggcaggtaaaatcaaagcattctcaacctccattaacgcggtcgtcacatttgaaccgtccgtacaggagaacggagatgtggttttgaaagtgacgaagttttcattaggtgaattaagcctgccaatcagctttgtgctgaattatatggacagcttttatgaactcccgtcatttgtgcacgttcattccggggataaaagcatcgagatccgtctgtcagaaatgcctttagacaacggcatgtatgtaaaagcggataaaatcaatctcgacacggatgaaattgaattttcctattatcatccgaaacaataagttttcataaaaaaaacacagatcctttcagggatttgtgtttttttgtgtcagcgttttttgtctagcttgctgaacagtttgattaacgttgcaagctcttcatcagagtagcagtcaaaccgtttaaaaaagtattctgtttttttctggttgaaatgatcgacaattttctccccggcttccgtaatatggattctgataattcgcctgtcctctttagaacggatgcgggtgatccattccttttctactaaagcatcggtcactgcggtaatgtggcttgcggagacctcaagaatgggggcaaattccgttacttttttaggcccttgttcactgagaatccgcaaaatggtgaattcgttcctggacagctctttatctagaatttcattaacttcatttctgatttgtttaaacacttttcgaagcaaagcttccatatcatacatcatttgtgtccttactttcaaatcatgaacctccaatatgtagtcagcgtggcattcgttcagcttctcctgagagcagaattatttttattctgtttatacatgctataatataataataccacgtatgaacaaaggagggcacccgtatgtcagaaaaaaaagaaatcgccacatttgcaggcggctgtttttggtgcatggtgaagccgtttgacgaacagcccgggattgaaaaggtggtgtccggctatacaggaggtcatactgagaatccgacttacgaagaagtgtgcagtgaaacgaccggacacagagaagccgttcaaatcacatttcaacctgacatttatccgtatgaaaagcttgtcgagctgttttggcagcagatcgacccgactgatgcaggcggccagtttgcagaccgcggaagttcatatcgggcggcgatatattaccataatgatgaacaaaaacaaatcgctgaagcctcaaaaaaacagcttgcagaaagcggcatatttaaaaagccgatcgtcacagacattttaaaggctgagcctttttatgaagcggaaggctatcatcagcacttttataagaaaaatcctgatcactacgggcgctaccgtgtaggttccggacgtcaaggctttctggatgagcattggagggacagataagatggcttttaataaagaagaaaaaatcaaatcattaaaccgcatgcaatatgaagtcacgcaaaacaacggaacggagccgccgtttcaaaatgaattctgggatcacaaagaagaggggctgtatgttgatatcgtatcaggaaagcccttgtttacatctctggataaattcgattctcattgcggctggcccagttttacaaaaccgattgaggaagaagaggttgacgaaaaactggacacaagccacgggatgatccggacggaagtgagaagcaaaacagcggactcccacttaggccacgtatttaatgacggcccggggccaagcggtctccgttattgcattaactctgcggcactccggtttattccgaaagacaagctgaaggaagagggctatgaagcctgcctgcatttatttgaaaaatagagctcagcaatgaggcctgcctatcagacaggccttttttctatgtttttttttcttcatgtaatcgttcaataatctttacgattgtttcttttgtgatgagcggcgcctgatccgattgatatctggggagattgaccttccgaaattccggatgtttggcgggatccggcaatatcgcgtaaagattgccccattcatataaagattccgtctcatgaggagaggtcagttcttcatgaagcttctcaccggggcgttttcccacttcaacagcggctggctgcggcagtccgtgccggaacgcatattcttcaaacccgtgaagcagttcttcaagcctcagggactccattttaaaaataaacgtttctccgccctttgtaatcgccgcagattgcagggtgagcgttgcggcgtcatcgatcgacataaaaaacctcgtcatgtttttatccgtaatggtgagcggaccgcctgccatcaactgctcaaataaaataggaataacggaaccgcgtgaaccgagcacattgccgaagcggaccgaacaaaacaccgtaccgcggttttgaacatgatgattcgcctgatgaaacagcttctcggacaacagcttcgtagctcccattgtgtttaccggggaaacggctttatcggttttttaagacatttactgcattttgaggaactatcagtggcggtgagatcgaaagcgtaaaattaaacttcaggataggggtgatttcaaactgagccggaattggcccttttctttttgtgtcatcgtaacgataacttctttgaagaccattcttaatagcgagttctttttttctgtgcttgtttcaatgtgatattgatcaattatcttatttatgttgtttctgactgtattactgtctatttctgattgcgcttcttgagttccattgagttcatgcttggcaatctggagttctttaaattcttcatctaaaacagcttttcttttcaaaaaaagttcatcagtgtaaatgccgctttcatatttctcgaagataaaattctctttgttttttaactcttgttctttttgtgaaagatgttcagacatttgcttctttgttttcacattactatttacgtcttcgtatttagaaatcatataaatgatatgttttgttaaagtcttattatctaagttgcttaaagaagagaggtaatccagaatggcattttcaacatcgttatatctcacataagtgcatttattctttttgcaagtgagtgatttaacgtgatacacactttccgtgccgtttttgttttctcgcgttcgcctagtttcgtatttagataatggttcaccgcacttagaacaagtgcatacgcctgccaattcacttaattccaatgcgtttttattaggcagcaggggaactttgtttgcaattttctcttgtgattgttgaaattgttcttgatctattatagggacgtgtgcatccgatactataatttgttccttttcaggtctaattgttcgtttaccgtcttttgttttttccctaaccttatatttaacagttccgatatacgcttcgttttgcagaattgctttaattgtgtattgattccagcgcttttttcctgatggagtcggtatttgtaattttgttaagtgagaagcaatcgctgtataactaacttcttttccattcaacccatttaaaaagatgttaaagatgaattgaacgacttttgctttttcttcgactgggactagtttggatgtttttttgtttaaccggtatccataaggcgctagtcctgaaatccatttcccttgtgccgcatatgtgtatttagcgcctgtcatacgctctctggtcatttcaaattcttctctggccataaacaattcaaaacgaatctgacgcatgtctgcaggatttcgagggtcataaactttatatggtgtaatgataatcaatcgcttactttgaagaaggttaacaatttgtcccgcatcactgtagctcccgcggctgagtcttgttatttctttaacagcaattgcctggtacttgccttcctcgaggtctttaagacattctttaaaaacagggcgaccctcaatgctttctccagatccgatttccatttttaattcataggggatttcaatcgacttcagtattttattcatgagttcattttgttctgttagcgtatcttcgcctgttcttttttcccgctccatatcctgacgagagcgtctgagataacccaaaatatttgtaatgttgtaagaatgaacgatgttttttaactccaaaaaaacagcacctcctctttattgtatttactgtaaaaacagaagtattcgtacaatattctgtctgacattgaatacgagaataacctaaattctgaagatgaaacttttctcgtccagttgtcaggtgcattttgtaattatgaaaatgataaagcgaaagaaatgaataaacaactattcattaaccgatacggtgaagagcttggaattagctccattaaaggagataatcgatcagaatatgaagaaattattcgtacttatgaaaagaataattacaagcagaaagaaattaatatagatgagctgctgcaggcattatttgagacagagatgatgttatctttaaaagaaaagttttgataaaatcctaattgatgtatcataggggtttaatcagccactataggccacagagtccctcacacgctctgtggttttttgtttagattgaatgtaccaaataaaaaagaagcctcagaggacttcaaactggctctacggataggatagtaattaaaacagcaaataacacttacattttgttcaccacaagtgctgcttcaattatgaataaaattgttactgattaacaaattcgtatcctcagtaattattctgaggagtatgggggtgtttttattgactaactttgtccataagactatcaatggtttgaaaagtcttttagatgaaaaaggggctattaaattgttttgttctgagggatatattgtagagagccttgtgactttttctccaaacaaagcgtctcttagtgaaatccaaaactttcagtcgaatcataaattcactcttcctgatgattacctgaagtttatttctcagcataatggtgcgaaaattttcgaaattctttcagagggcgagaatattggaggaggtcttcatctatttagccttgaagaaatagaagaagaactaaaatacgagcttttgtttgaaggtatcaatggaatacctgtggctacctgttggaagaatgtcatttaatgatcgacaaggatagagtgaatcaaggtgatcctaattatctatttatatttgaaagtggttcagaatataatccattaaatttaaactttgaaatatttttagaccgatatattatgtcgaacggggatgctttttgggactggaaatactatacagctgaaaattattacaggacgagataaaactgtgtatgacagtcggaacggactgtctttttctgttaatcaaataataaagctatggtaaaatttagacagaaagaagcagaaaggagacgtaaatgaaagtatttgaagcatcctcgttaatttcagtagcggagaaacgggcaaaagaatacgatcagattagagaacaatttatcaatctcagaaaagcgtttcagggaatggctgatttagatgacaatgagttttcgggcaaaggtgctgataacatcaaggcattctttcaagatcacgcaggtgttacagacagctggcttgatctgatcgatatgaagattgcttttcttaacagtatttctggaaaagtatctgatgccggattgaccgattcgtttgtggaagagtcatttttagaacatgaactgattaatgcgaagaataaatcaaaagctatcatgcaggagcagcggaatgaaatgagggatattcttaatgagataagcgatattgttcatcttgatgttttctcgacagaggatgtcgatcaaaagctggattcagcagataagaaacgggacaataccgtacacaagctcggaaagctcgatcatgatctaacgaaggaatacgcagaaaccgaagcgaacgagaatttcatccaagcagactttcaacagctccaaaatgccacgggtaaagggaaaaacgcaacaccacttcactataacgtcaaggcgtacagagaaagtgtcatacataagaaaaaaggcgagattgcaagacattcagatgcttatttgacgattaaaaaagaagaagcgaaagagcgagaaatcaaggatctgaagaaaaagctctctgatggagtaactgatcctgatgaatacttggagattgccaagaagatcggttacgagaaccttgaaccttcccaacaacaatatgtgatgcagcttgaacaagcaaaacagatggaagaagccggagaagtgacctgggatattttaaaaggagccggcgtcggcctttatgatgtcgggaaagacacggtaaccggtttgtggcagctgatcagcaagcctgatgaagttgttgaaggtatcataggggcagttgcccatccaattaacacgtataatgccatttcaacagctattgaggaatcgtatcaaaaagatatggtgaacggggatgcttactccagatcaagatgggtgacatatgcggtcggttcagtggctgtggctgtcgtcggaacaaaaggcgcaggagccgttaacaaagctgatgcggcggggaaggtcataaacaaggcaggacaggcaggtcagaaaattaaggacattaagatttcagatttgcttccttataacactaagtatgatcttgctctggctgataacgtaccatacaatgtggttaacagccaaaaccttaaaaatggacttttgtccagtgcaaagaaattggatgaaagcagaaagccatttactggtcagaaagtaaatgtcccttggttaaataaagagaagtatgaggcctatgaaatagacggcaaggtaaaagttaaaggagagcctagagatgtaagccgtagagtatacacaatgaaagatattgaccttaatcaaaaaaatcgtaaaggctttacgaatcttcaactgatgaaaaatggtaatgctccgtttgctaaagatggcacgcaaataaatttacatcacttaattcaagaagagcctggtactatgctggagatacctgaaagctggcataataagtacagtgatgttttgcatggattaaaagggaatggacagagttttagaaatgatcctgtgcttgataaacaatataaaagtttcagaagaaggtattggagatggagagctcagcaatttgagaatcaagaataagaggtgaaagtttaatggattattcgaaaataaaaactttctttgatgaaaataaagaaaattcaattctcacggggggagtcactgaagatcagattagagaaatagaagaggagctcaatgtaactcttccagacagctataaatggtttttaactgagtatggttcagggggagcatacggaacaatgattctcggatatgactctcacggcgctgaagttgtcgagcagaccaatgaatataaaaaatattataacctttccgatggtcttgtagtgatcgaatatgtagatgaattttcttattgtcttgacactaacaagatgatagatggagaatgcccagtcattctttgggataaccaagagggatatggtaaacaagttgctaggacattccaagagtttttaatagaagagcttgaagaatcgaaagacgactggatcgatgatgaggactgggacgattaaaactaaaaagaaggtctatatctgtttttccatagcatatgaaggagtattaaaatgagcttcactaagatcaaacaaaagttgaaagagtttacgattaatgctggcacagatcctagcattaatacaaacgagcagctcaaagaaattgaaagaaatataggtaatcaattgccttccgactataaggattttttgaagggatatggaggctgttatttagaaagtaaaaaaacaacagatgaggttgagtatgacgtttgctacaaacctatagagaaagatccttggatgggtcaggaagatgatacacaattaatagagagcttctatggtttagctaacgatcataacagtctccaagaagcaatcaatacttattctgatcgctttcccaggaacattattcctatagcaagctcggcaggtgggaatgaaatatgcatggatatcgataatgaaaagatattgttttgggatcatgaattaagtcaccccgataaagactttttccttattgccaactcttttgaagagtttattctaagtttagtagatgaaccaattgaaactgataataatgacagtgatgtggaaattgaggttttagacaatgactttgcaaaattgctctttggtaaggacaattagcttttattgttaggaaaagtattgcaaagttaagctctcagaaagagagcttttttattttcgatagaaactaattataaaaagggagagaggttatggattcgtaccaagtaaagaaattaaaacccgaagaataccataagtgtaataatatttgggacatggaaaagaaaaagaaaatggctaaggtgttttatgacgaattagtaagcggaaacagaattacttttatttactcagtgaatgacgagtttataggagaaggatcgttagtttttcaaaacaatgacccagattataccattccggataaacgcatttatctgtctcgtatgattgttaaagaaggatattgaaattgcgggataggcggtattattgttgattatttgattgattatgctaaacaacttggatttgaggaaataacattcggtgtagatacagataacttaaacgcaagacatctatatgaaaagaagggctttacaaccgtattatttcttggtgaagatgaatatgtaaaactccttaaagtattaaaataaaattcccgagaattatggtgaatgtgtgggaggttactttcacaaacgatgatagacggtaacttaagctaatctaattcgttattaagatacggattagcatttatcctctcaaaaccaacccgtaatgaactaggatactgttggctgaggaattatttttccatgtattgtattttatggtattcttgaaatgaaaggaggagacaatgaaaaagaaattaattggggtcttgatcattgtttgtttttctgtgttcatgtatggcgcagttacacattcttttaaaaatcaaaaatccactgaggaagtattagaaagtgcatgggatgaatttggcttatttagccttggaattggagaaacagacccagtcatatcaattggtatggataaaacaaaaaatgaagaagaattacgacgctatctaaacgataacttatctaaggaagttaaagaagaatataaagttgagatcattaaaaaggatattaaggttttagaaagacaacatgagaagtatttggaaagtaataaagcgcattgatacattaaagatgcttatcggctccaaatacaataatgattttatccaataaacaaaagttttgcaaaccattccaatggtttcatttaatctgttataatcaatctgtaaaatacagactggttatagtgtatttctttaacaagaaatgcataaaataaaaagagcatggtgttggtcgcaacccatcaaagggcttgctcagatgttatgttattcatgatagacctaacccttcaggttatcaggctcaagggaggtctattttttatttatatacgtcaacagggcgattataaacgacccaaatgcaagcattcacattaatgcctgaaatgttgacataagcatcaccccctttctatagggggtgagcaagactccaagactccaagattcccttaagtgagcatacttaatgtacaggaatcatttatatgtcgttaaaaacccattcagttacctatgcgaaaagaaccatgttagaatcaggttcttttttgaatttgagttaaataatcggctggaattaccgataaataacatgtgaaataataccaaggaggttaagggattgaaaaaagtacttagtttagtaacaattacacttcttgctgttacaacgatgttttccattagcacatcgaaagcaaaagcaattgaagcaacaccgctttacagtcttcagattctttccgtcacatcggatggaaacgactttgtatgggagcctgttacaagcagcaagccaaatgcaacaaatgttttgaaaggtgacaagctgcatattaaagttcgctttatgggctatacaaattcgaccgtcattaaagcaaaggatgggagaaatttgttatacaaaggtgaagcgaacatatacaaatatgaccctatacttggacaaaacaaagttgtgataggatgggacaaatacattgaaattccaatgaacgaacttccttcaaatgagattcaagttgaaggtcttgggaaaaacatgaaaatcatttatagcaacgttgtaaaattcgagagaggatgaatgttatggaaggtctaaataactcttacaatatcacgaaagatccgaaatttttagcgttttgcagtttagcgacagaaggtgcaggaattagttcgaatacgcaatgttcaattggttttaatgaattcaaagaagcgctggagaatggcaaagtagttgataataaaaaccttaaaagcagttcagagttaaatcaccagtttgattactggaagtccagaataactgggggacgagctgtaactgaaactgataatcaagtgttagatatcatcaaacaagcatacaatcttggaatggttacgaaagataatatgcttttgagaaatcaagccattaacgcgtataaaacatctatttaatttaaaattaaagccccttattcaggaaggggcttttgctttgcaacttattctttatgtttaatctaaaaccataaagtcctgcacttttgtttcttcttcaggcaaatcaaattcattaagtttctttttagtacggatatcaaaaatccccatatagccaccaatcccttttttgttttcctcttgtgaaattacataaagtttttgatctttaaactttgcattcatatacggaaattttaaatcgaatttttcaaaagaaaaatctttatcgtactcaagtaagcaggcgtatacggatttattaatatatgtaacgtaaaatttaccgctttttttgtcgtaatacacagcgtccgcttgttcgagatcatcaggatattttatgaattttgatttccatgatcctttttcgattacagttagttcatgttctgagctagctacaacatatttttcagagtgatcaaatacatctccataggaagctaatccaatcgttttaataatcccttctgtgtttctatcaatgacgtacatagacattccttgaatgacgtaaatatacctattatcgcttcctcccatggttacgagggtaggcaaagtcaggctatattttttattgaactttttatcatttactttcagttcatttccattggtgtcgacattataggcttttacagaaatatcttctccttgataccaaaaagcaaatggattggataatttatgttctttaatagtgttgttttttaatgtgtaataatatggttcatgttcagctaacaagacgatatcgtctgaagagggggtttttttctggatatatggtatatccggtaccttaaagtatcgtttattgaatttttctccttgtgatgtggatatgagtacgcttttcttgatgagtggatttgaatagataaaaaagattttatcctcggttggatttattttagaagtacttacagagtgttcacctttatttataaagaatgcattgatcaacaatataactattgcaccaattagaactcctgaaatcccatataaaacataagactttttcatataacgctccatatcttttatataaaaaaacacacttgcagaataaatctgcaaagtaaatgattaggagcagacagtttttgatgagcggtcaatatccagatgtgacaagtgcttctccattactgtttaggtctgttccttttgtgtttttgtatgattgccacacaagtttagaggagcaatactatttatttgtgctttttttggttgcagctatgaataaggcttacctgttttactatgaaggacagcattgcatagagctttacaggtgaacacagatcataaaaaaacaccccctatgcgggagtgccaaaacatttatgcggtttgccctctacgttccactgagaagtcattatggtgatcaagcgcgatatggatactggctgtgtggcctcttcgggcttctttaaaaactttgtggccgtcaagaagataatgtccaacaagcccaagtaagataactaaaaagataaaagccgatgcaaatttaaatttcataaagacaatcccctctctgaatttgttttcgggcataaagcactttctcataaaaggctgtagctactttatggtcttcatttacattataatacattgctgcatcagtcgctaggtcttccacatccgaaagcatagcttttgattctaagtaatctaagattttaaaaagtcgttctttgtcattctcaacgaataaacccataagaaaatcaaacatttttcctaatacgtcatcgttcaactcctttgaaagcataagaccttgttcacaaacctgttttccatcgaccgtgttgaataatttaaagtgcgtttttgccaacattagaagtatgtcaagcagtcggctagaattgtgaagagaattactttgataaattgagacgccttctttaaaatactccaatgccttctccatatgtcctgttgtaaatgagcataaaccgagattgtacaaagaagaacctattaaccgcggcatatcaatttcttgtgcttgttttaatgcattcatgaaatgcggtattgctttttctggatactccatgtctaaataattcagaccgatgacgaatgaacattggattactcttattgagtatgtctcgtgtgctttgtaggtttctattgcttgaacaatatgatgcatagacatgtgggtttgcttcatgtgatagtacacttcagcaactttgtagtgaaattcagctcgctctatttcatcggggacaatagatatcttcttttcagctcggttgtaaaaacttattgctttaagatattcgtactgttcaaattcatacatcccatgaaaaaagttaaaataatattcaagaattccttttagatcgctttgtttactttcgatctcttctgataagtctgaaattttaggtcgttcttcattcatggtttttggttcaagataatcaagcattaattgatgtcgaaaacacatgagcgaatagtacaacaataaatcttgatcttcttccatatgctctatttcttgttcaacttcaccctttagaatttctgcatctgcaacactgaataatcttatgtatttgtaccatttattgatttttaagccaacctttgaagaagagatcaattgctccaaaaaaatcaccctcctagtatttcgactgattatgtaatattttatcataatgtaatatattaggaagagtgttttttcttaatttctcaatttggtgtggaatgcgatagaagccccctcgttcgagaaggggatatgatcaatttcctgttgctttcagtgaggcaagccactcatctaatgttccggagaagccttgttgaacggctaattcatatgctgattttccatctttaccggcagcgctagtagcttcagtactgcctttttcaccttttttttaatgaagctaaccattcaaaagtgatgaatattcaaggcgggagtaaggaaaattaacaaaaaatgtgagggaatttagatgaaacgatttattttggttatacctttattggctgctgttattgtctctccaactcaaatgaaagcaagtccaatgccttgtagtgcagtactcgaaccggtgaatcaaaaattgaaaaatgcgaagggtgcggcactaatctataaagtgcagttatacccgccaagtgctgcgagaacgaatatgagtattcttgctgtccaccttcctcagccatcttcttatggaagctacgacggttatgaaggatttgcctccaaaacaggggagatcagttggcgatttaaactatatccgactcccgagggagagagtcctaattgggctggaaggattgattccatatcagctgaagtgacaaatgttcaagtgcaagtacgcctttcaaattctaagacgcaaaagttggggccgagtgtattaacaaataatattcaatcttgctattagaaatgtagagctcttatcaaagaaagaaatgcgactggatcttttgaaaaaattctggtgaaaaatgaagaagagtccattaaggcggagtccaatgaatgatgaggaattaagaatcattctgaaatcaattcatcattgacagaacagagccggcaaaagtcgatattgcgtttgattttgtacaagaaagacggcataaaaagaaatggttagctaaaaaaaggcaaagagtcaacgctctttaccatcaggtgttttccttaagcggtctgcaatatgcttaattaaactcagcgcagcagtcactaatccaataactaaagcaatctcaagtaagaggataattccaaaatttaaaccgagactttcaaagtaatcaccagtaaaagagagcaattgataaatcccaagcatcagcacaataaaggaagcgcctataatcgccagagactttttagagaactccttagtatggttaaaattataaaccaataagaacaaaaatagacaagccatggcgatcttatgagtcaatgaatcacttgctgaaaacccttgcacaagtaaggagataattaatccggtcattccgattattttgttcaatatatcacctgctttgtataagtatgacttagatgtcagcttaccaattaaaggtgaaattctcaacataatgcagtttaaagttaacttaaaatgtgattattttaagaaagaggttgaaatatactcgattgtcaaaaaggggagcaagtaaggtctttgagaatggagaaatgggaattatattgtggacgacaaatcgaggttctgtaggtgttgaatgggactctggtgaatatggtgaatacaatgataaagtcgatgagctatttgttagcagattaatatgttttccgaaagttagacgaaagcagttcattaaaggaagggttagacaatgattaaaataacgctattccaagatgaatattgcaatggtgaatgggttgaaattgataggctattaaatatatttataagaacagagtcaattaatattgaagttattgatatcaaatacaattcactaaatactgtgcgaactcaaatacactctgcgtatatatagagaaaggacttaagatcactaggaccgaagatgaaatcgtgattttaaacgtagtaagaggaagaaatgaaaacctatgtagcaaccaaggaaactgagtactttaccaatgaatccattgaagaggtgctttatgctggtacaataaagaagctgcgtttagcaaaattgatggcacttcaggcaatagactaattttagatgtttgttttgatggcttgaggattaaatcttttatcaaaattcataatggtgttggcgagtagcttttgataaattggccagcgcaaagaaagaggttgaagactacaatgccaaactaattgaggcaggcacaatctctttgaaatgttggagagagctggacaagtctagataaaagatagtttttattcaaatactcaaggcagagcctatcgcacctacaatgccaacaaaatcaactagtgttgttacgttgctcataaagtcaaaagaattgtttattagaaacataaaatcagcccctgtgaaaaaatttaacactaagataaaaaataataagaagaaggattttatcactggcttgttttttgtgtaggagcagccttgaatattcgattgtattactaatatatcaaaatttctacaattaatccaattctctcttacgatagtttttaacgaatacaaaaaagccccacgaatggagctgctagattacgtattattgaacatagccagaaaagtcgctcggagcagagaaagatagatagtaaagcgcattggcatctagattttttattgttcctgtagctgtaccgttagcatttacagttagtgtttcagtagcaaaaatccagtcggaatcattccaaactttcacagttagtttagttccaatattatttgtaattgaatagcttatcgaagatttgccttgaaaataactgtttgaatataacgtattgccagttgcttgtccagcgaatgtcaatttgtttttcgtaagatttacaacgctatttgaattaggagggttaagaccaaaagctttaaattcactttcgacagagttagtaagcttagttgaaaacctagaattgtcggtctcagcagatgcggcagtggcaatgctcagagaaagaatggccaccatggtgcaaacaataaaactaaacaactttttcaaattaaacactcctttatttgtaagttaaagtaaataataacatttaatttcaggaggtcaatgggtttattcaaactggaatgaatctgtcacaaaatatgaagagcattttggtgaattacagctaaacgatttggataacttattgtattatgtactgaattttcagtctgttttgctaagcattaaggagttatgtaatagagagattatactctccaagattcaaaggaaggtatgcggagtttaccatgtagtcttaaatctataatcactttcagccagctataagaatgtttattaatcccatatggagagttagctttattaatacgacgattccttcaagatgcttttcattggcagattaaagtaagctaatccgtttccctgcagaccttcaataacaaatacattgttatggtcaaggttaatgtctaaaagcatgcttttccgttcagtgagcgggttattagcaattgaatgccaattaatataaattatatcgactacacagtaaacgatattataggcagattttttagacataaagcgtcccattacagtctcaaagtcaggaagcaaaaacaacagtaccattgagcatatcaagattcgagatttctcaacttgcttgttactttattgttgtaaacgagtataaagctggaaggttcagtgtagctttaggagccgaattgcttagagaaagcactgtatgaagagggattttaattaaataaagcagacattaagcctgctttatctttttgaacattattccttttttatatgaattaatgttctcaccaaatgcccgtccttaagattttaaattctgggcacggtcagactttttagggaaaatacattctaacaaaagaaaaaataaagttaatcctaatgataatttaaaattgtcgctgttcccaatggaacataagatacccactatataaataaataaaaacctaaacaacgaggcaaatataaacttgaagaagttatccccaatgagatgccttccaacagccacaaaaatattatcaaaagtaaaagaataaacaaccatacacacacttgttataacaatctgtttaaattctatttctaattcaaagaattttacaagcacatttgctgatcctgttgcaaataagattatcaccattatgattgcagtaggaatgagtgataaaaccaaagctcctattactgtagataataaaaatttttcatttgtgtttttttctgcagcttctttcttttctcctctgtacataaaaataaaaaagacgatgagagataaaagataaattgataacgtcataacaagcagattcatggtaatctctccttacctaattaaaacaaaagagtgaaggttgtaagcctcactctcttgtttttaatgtatagttataccaaaaagaacacaacaaccttcgcaattaactgtgcatcagctaatggaattccggctttcactaaggccacagtaacagctgtttctccgaaatttgtaagttcatctataacgtccgccgctttgtgtccccacttagaacaagcatcaccagctttttgtgcccatttatatgggatctttttaataaggtttcctaaagcggggccaccaaccctaagtgcttttactaatatttgtttagcgaaaggaatgccctgtgtatgtacttcaggatttgaagctaaaggagcctgtacgctattttgaactacaggtgcttttttactttctgctgcacttgcatagccaggagaaacaactgatatagccagcacagccaacgtgaacaccatgataaatgaaataagttttttcttcatttcttcaccatccttaaataaccattagtttaatatatttacaaatataatggatatttgtaatgaaatcaatatattacctaaaaaattttagttataaaagaaggaacaagaattttaaaaacatacttttgttattatacgagacacaattttcttaaaaaagaaccgaaagtctcattggggatgcccattttatgccgtggagaagattcaataaaactgtaggtttaacaaaaacaaatattttcaggagtgtaatatcataaaacactcagaggggaattaggtttaagaaacaccattggcaagattgaaattgttggaattttactggagtggtttgctttatgattttggggcaggagttaaggcgaaaagagataactcagacttggaatgatactgaaagcaacgtctacgatcaactttgacaaatactcaactgctgctgtcgttcaaacattaggatttgcttttaatttgcctacaggggctggtcatctgatttagctggattagctaataatgatcattctaggtgaatataaaattgtttacttttaggataagcaggaatgtaagatggcagggacggctcttatgacaaaacaccttgtaacgatttatgaagataaggatcaaaagaaaaaatcgggagtgacagctttatcatcacagacaaaggcggcccaaaagttgctgcaatgtgataaaaaataaccctgtcttaggcggggattattacatgctgtttattatgctgtaaacaaacgcaacaataaataatggataagagataatagcaattagttttgaagatttgctctttttttcaaatgtgtatattagtgcaaatcctaaaaagaatattgtgacaaaccaagaagaataggacgggtacaatgcaataagtaagacaataagagtggataacgcaaaagaagagtcaagtgttattttctgatcgtttttcaaataaaccgcctccttacacatattccacattagatcgcttaaagaaggtgttgtggttgatcagccaattaaatatttcatgatgcaattgtgcggttctatgatggtaaagacctcgccgtgttccataagactacggggaagttgttaaaatccttaaaaatgagtcgttttagtctgtcatttcctaaaacagtgttttactcttgttacaaatatgcaagaagggcggtttgaacttgtatagattatgtacaatgctgttaattttgttaagtataacattagggtgtcaaaacccaaagcaaacattttatggaggctgagcaaaccatggtcggctatgtcattttaaaaggagagaatcaagcaattttcatacataatgaaaaagctaatgttaaagactatgaaaatcttagtgaaaaagagattattaaaaagtatagatcggatatagttttactgggacttagtcaacttaacaataaagatgacttgagcaaaggacaaaaaattcgtatttggtataaaagattcaatgaatcttcaccgccaaaaacaaatatctcaaagtttgaaagtatttagtatttattctttgattcccagaaaaccgctgcaaaactgaagcggcatattgaaccgaaataatgtcttcaaacctcacgtcattcttcattcgcggtggcttattcctgccccaggatttatttgacaattgttgactcaggtgcagagaaggcatatgtcaagaacacattttgaattactgggcaccttgaataaagccagcattcccatattcatatgcgaagagatcggtactgaacgctggatcatacatttgaacaagcttgcgaggctttgataaagaaagaacagtcaagagacgaaccattacatacatataatactcctgtgaaagcgggggtgtagttttggaaccttaccaacgttatgaggaattaaagaaaaaaacaataaaggttgtccataaagataattacagtatccgctatatagatcaggatgaagcgagtaatgacttagatgaattttataaacaatttgctcagcatttattggaggctgctttggaaaggagtgcagagtaagcttctttttttgatttgtttgtggtaagtatcttaataaacggctttatcagtactgatattaatcacatgcgtcacttcttgcagcaaagccgcttctgcgacattttgtccgccgataaggttggtttgaatggcttcaaagggattatcctcacatgtcggaacctgcttcagcgcagctgtgtgaaagacaatatcaacacctttcatcacttggttgactcttctgtagtcacgaacatcgccgagcacaaacgacagtctttgttcatccgcgtatttttgcttcatcacatattgtttactgtcatctttgctgaacacaatgacttctttaggggttaagagcaaaaggcgttttactatttggcttccgattgatcctgttccgcctgtgacgagaacagttttatcgtgaaaaaacggttgtagctctactgcttgctgtttaggcatggcttatcctccaactctcgtttctctaccatgcatcatatgttgaacaatttcagcgagttaatgaaagaaaccaataaatcaaaaattagagaaaaacattaatctgatgcgctttcatatcgcgttacccgattaatagaatagaaattacaaataaaacattgtactaaatattcattttaaatatttgctcacgtcaattttttctcttcataaatcctcacattcggacaatcttcacaaaaacttaacactgaacttcctgtatgtattttacaattaaagtgcacgttcataaaaggaggatggaaaatgaatcattcaaaaacacttttgttaaccgcggcagccggattgatgctcacatgcggtgcggtttcttcccaggccaaacataagctgtctgatccttatcattttaccgtgaatgcggcggcggaaacggagccggttgatacagccggtgatgcagctgatgatcctgcgatttggctggaccccaagaatcctcagaacagcaaattgatcacaaccaataaaaaatcaggcttagtcgtgtacagcctagagggaaagatgcttcattcctatcataccgggaagctgaacaatgttgatatccgttatgattttccgttgaacggaaaaaaagtcgatattgcggcggcatccaatcggtctgaaggaaagaataccattgagatttacgccattgacgggaaaaacggcacattacaaagcattacggatccaaaccgcccgattgcatcagcaattgatgaagtatacggtttcagcttgtaccacagtcaaaaaacaggaaaatattacgcgatggtgacagggaaagaaggcgaatttgaacaatacgaattaaatgcggataaaaatggatacatatccggcaaaaaggtaagggcgtttaaaatgaattctcagacagaagggatggcagcagacgatgaatacggcagtctttatatcgcagaagaagatgaggccatctggaagttcagcgctgagccggacggcggcagtaacggaacggttatcgatcgtgccgatggcaggcatttaacccctgatattgaaggactgacgatttactacgctgctgacgggaaaggttatctgcttgcctcaagccagggtaacagcagctacgcgatttatgaaagacagggacagaacaaatatgttgcggactttcagataacagacgggcctgaaacagacggcacaagcgatacagacggaattgacgttctgggtttcgggctggggcctgagtatccgttcggcctttttgtcgcacaggacggagagaatatagatcacggccaaaaggccaatcaaaattttaaaatggtgccatgggaaagaatcgctgataaaatcggctttcatccgcaggtcaataaacaggttgacccgagaaaactgactgacagaagcggaaaataaacatgaaaaaagcagcttatccaagctgctttttgatgtgaagagcgtttcatgagaaagtcttggaacggatagccgtaagcacagccggcagccggtcatacgtgtacgccggtactgtctcttgataattaagcgccgcgatttgtttacgttcacccgggtttgtcatataaaaatggatcttatccgcaaaatccgcaaacccgctgtaagaaacaaatgttgaaaacgggggcgcgggagaaaggtctgtcagctgaaaggcctgacaagccgcaatgtctaagcttctcgtatttaaactggtattttcgatgccgcgtccgttctgattgagcgcaaaccgataagaacggtgagggtttaagaccacctctgcgctgttgtaatataatgcggcaagttcgggttcaatccattcatccattacgagcacattttgctgtctggcgatttttttaggcagatgtctgcgccatcccttcccgataatacgaagcgtatacggaagcttcgccgctgctttcaccagttcaacgcggttcggatacgggtatccgatcagaagcagatttgtgtgaagagaggcttcagcaggttgttttttaaaaagccgctgattaacggggatcgggacataatatacgtgctgtaagcccatttgccggtaagcatcaagcgcgttttgttctatcgttaaaacggcatccgcaagcggcgcgattgtcatactcacatcgaaataaaaaggatcctccgtcatccatagatatacgggaatctgttctgtcttcagccattgaagccattcagacggaatacggtctcccgtcatcatcagactgatgtctggtttgaatgcccgtatactgcggatggtatcttcctcaaactcagaaacagaaaaaaagcggacggaagactgtaaaaagccttcctcgatccagcggtcaaaatacgtgtatatgcctttatatcctgaacggatatataaaacgttcatatgctgttacgaagtgaacgtgacactttcaactttgtcgacgtcaagcaatgttgtagcagagcctgccggtgtaacggaattttcctgcgtaacaaaaacgattccgtgaatttcgtcaaaggcaacaaattgaaccgggccgatcatgtctcctgaatccatcacaatgctgatgacagtgccgggctgaattcttgcaaaaatccatctcgccgctaatgaaataccgcttcccaatacagattgtgcgctgagactgtctttcgccgctgcttcatccacttttgcatcaattgccgattccaataaatcttttactttgttttccacattatctcctccatctgtgccgccagataaagcgctgttgtcaaatacaggggctaaaagagtttttaataacttctttttaagctccaaacgatcctcgctcatgcggacatacacctcctttacaatttcaacctcacgtttattcatattcctgattgaaaagattggtataagtcgaatgccgttttgcttgcatttttttcaataattaatcaaacagctgaattttcgaatcaggctttgtttgcctatgcggattgtaagagtatgacatacgttgtatagattaaaaaatgaaggagaggaatattttggattcaggagaaactgtaaaacacgggggttttgaggaggaatttcagctcgtactgcttcttcttcttttgttatctcatcagccgtccggagatcattcagatttgcggcgtcagcttgtaatggcaaaagagcttggggttcctgtgtcgcgcgtcaatctgattaacggcagcacactgcagaacgtaattgtcaaagaagtgctgtcagatttggccgtttttcaaaatccgctcaataatacgagatcaaacgtcgcgatttcaagcatcgtcagctgggggctttttaataacgatatcaggctctgtctctttcggagccgttttttacgttttacagaaggggtgatgggatggaaaagaagatctcaattatcttaacgagttacaacaaaccggatcttgtaaaacaggcgattgaaagtgttttgcatcagacctacagcaattgggagctgtttgtgatggatgatcattcaaatgaagaaacctcggccgccatcagtacgtatataaaagatcatcgcatatattatgacaacagttttatcaatccggccgaacggctgaagtcgacccggtatgccgttttgattaatgatgcgctttcacgggccgaaggcgaatacatcacttatttgacagacgacaccgtatttcatccgaataggctcagccgcatggcggaagcgcttaatcaatgcagcgagtttgatgccgtctattccagccagaaggtgatacatgtaaacgggcgcggaacagaacaattccacttctatcgttttgctgaagaggtgcttgatcaggccgcttttctcgttgatcactgttcagtgatgcaccggagatcattgcttgagcgtgtgaaagagaagttcggcagcttttgggacgaagatgttatgcattggaatcacggagactctgttttttggagcaggctcaacacatttacatcatttctgccgataaaagaagtgttggatacgacctataaaacaccccactcatttcagaacacgtatcaatcgcttccgtctgtcctgatcgacggatcctttgtaaaggggacggatcagaaagtatatcagcttgaccgaaataaaaggaagcctgtaaacgagcgctggcatacgttatacgaaggccggaccgtcgtcattccggatccgtttttatttcaatatgaggaagaggactccgccagtattccgaattttcagctcgtcagggatcagtttcatgtttattttatagaagacggggagaaaaggctggttgatcatagcgcatttcgcttttaccgatttaaacggcatggcatcccggctttagaacgggccgaaatacaatcgcttccggacggtccgccgatcagccggtggacatcggactgtgttcaacatttgcccgggaggatgctgtttcgcattgaacggaaattttatgtttatttgagagggttctccatccgatcagtcatgacgtagcgaaacgattttttgcgaatcagaaggcgatacccatttcctttcagcaaattaaacaattaccaattggaatgccgttctatccggtgtacgatgaaattataagaaatctcaatataacaaaaggttgagagatgcagtcggatgtgcaaggaaaaggagagcttttatgaccgatcaatttgataaaaccgagaagcagtatatagagcttacttccggcattcagaggttcgagcatttcagtgtatatacggacccttttttgccgcagattttttcgcataactttgttcagctgcaccgtacatttccgttagacaaactgctgccgtttctttcgtccgttccgggcatgcttcaagccaattatattcatgtgaaagcgtctccggagcacgcatttccgcttcttctgaaacaaactttggtaaagcagggctgcgtagtggaagatgagctgttttttgcaaggaaactggaaaatggggacctgcaggccggacacccgctcactgcttgggggacggaaaagagcctcgccgatgggtcgtctattatgaacatctatgatgccctttacattggcgaggcggcggccgaacaaaagcttgagcggaaatatcctttgtataaggagggaacggttatgcttgtcgtgtgctacagcgacgcctcgcaaacgattccgatcggctgcggagagcttttcatcaacaaagcagataaaaccgcaaaaatagaagaagtcgcaattctggatcaattccaacgaaaaggctacggatcgatattgatgaatgagctgatggcggcggcaaagctgaacggcatggaaaccgtataccttgtgacgtccgggatggacggtgtaaaccgcttttatgaaaaactcggcttcaaaagatttcggcgcgtgcatacaatttttcattattttcttacatagttgggcattcgcataaaccaattgggagttggcccgcatacaatgccgtatatcgtaagaagaaaggatgatttgcgtatgtacggatacggatatggctacggttgcggcagttttggctatggttacgggcacggcggctgcggaggcggaaccagcacttttgtgctgatcgtggtattgtttattttattaatcatcgtcggtgcggcttttatttgttagactgaaaaaatcctataatgaaaatcagcctgcagagaacatcattttctgcaggctttttgttatttccatgctgaaaaatcagcttgaaaaacattttaatacatattacctttctggagaagggggagaaaatgtgaacatgacgattgaagaattaccagaatccagaattgcttatttccgaaacgtcggagagtatggcggaaagcaaaacaaagaactgatggagtcatttaaaaactgggcgcaattgaatggtctgcttgattattctgtcattttaggaattccgcaagatcatccgaatcgtactcctaaagagaaatgccgctatgatgtttgtcttgttatcaatcaagaccatgtgcctgaaccagcccggatcggtacattttccggagggaagtacgccgttttcttgcttgatcatacaaaagaggcagtcagcggattttggaacactgttttttctgagatcgaaaaaaataatttatcaatcagagaacagcctattatcgaaaggtatactttacaaaaggtgaatcatcatttgtgtgaaatattgattcccatacagtaaagaagacgggaattttccgccttctgcttatactgattcagatcaaaaatgatgggatgagcagataaatagcagaaccgaagaaagaataaaatcaacaataggaatagaatttccagaacgctcttcaggctgtcgggacatttccggcagcctgttttacagaaaggtattttctgcaaaaaactttctgaaggataagaatgcggttattcatctgttcatacaatgaagcaaatgggttttcgaggtggaaagatatggggagctatttaatcaaaccggagcttgacgcaaattatccgtcagtcagtcatggtaagggatcatatgtgtatgatcaggaggggaacaagtatcttgacggagcatcgggggcggtcacttgcaatatcggccacggcacggaggatattatacaagctttaaaagaacagcttgactccgtttcgtttgtgtatcgctcgcaattcaccagtactccggcggaagaactggctttatttctggccgatcatctgccgggcgggctgaattggtcattttttgtaaacagcggctcagaggcagtcgaaacagcgatgaaaatggccgttcaatattggcaggaaaaagggcaataccaaaaatccgtctttctatcaagatggggaagttaccacggcattactttgggagcgctttcattatcagggttctatgaacggagataccgcttcacccagctgcttgaacggtttccggccgtttcagcgcctaatatgtatcgttcagagctgcagggagaggaatttgtgaaagctgcggcggctgaactggaaacggctgttcagcggatcggttcctcatttatcgcgggatttgtcgcagagccgattgtcggagcagccggggcggccatcactccgccggcaggttattatgaagcgcttgaggttgtctgccgcaggcacggtattttgtttattgcggatgaagtcatgacggggctcgggagaacagggcggatgcttgcttctgagcattgggggattgcccctgatatcgcggtgctcggaaaagggttgggcgccggttacgctccgattgcggcagctgttgcgtctgatgacatcattgaaacgatcaagcggggctccggggtcattatgagcggacatacgtacagtgccaacccatactgtgcaagggcggcgcttgaagtgcttcgctatgtcaagaaacacgagctgcttcggcagtcagaggaaaaaggcgtaatgctgaagcggaaattagaagaaatcaaagaccgcagcggggtgatcggggatgtccgcggtaaaggcctcctgatcggggttgaattcgttaaggataaaacgacgaaggacgttttttcgaaaaaacaggccttcaccgaaaaaatcattaaagcggcaaaaaatcggggcctgcttatttacccagcaaagcccggtattgacagcggagaaggagacgccgtcatcatcgccccgccgttcacgatttcatatgcggagctggatgagctgtcagatctattttcccagtccgcagaagaagctgaaaaaatgatgaagaaggattgagctgatatgtctatttttcataaaaaaatcgatattcatgaagcaattgccgatgtcaaggacgaatctgtcatcatgttcggcggttttgggggagtgggttcacctccgtcattaatcgaagcgattttggaaagcggcgttaaagaattgaccgtcatctgcaatgatgccggatttccggaaataggtatcggtccgcttatcgttcataagcgggtaaaaaggctgatcgcttcccatatcggctcaaatcctgtcgcgggcagacaaatgactgacggagcgcttgaggtggaattttcgccgcaagggacgcttgctgaacggattcgcgcaggcggagcggggctaggcggtattttaactgatatcggcattgataacgcaaccgtttgtgaaaacaaagaaaccgtaacgattgacggaaagtcctatttagttgaaaaagcgctgacggctgatttcgcttttgtgtcggcacatattgctgatgaattcggaaatctgacgtttgacaaaacggcgcgcaacatgaaccctctgatggctgctgcggccgaaagaacatttgctgaggcggcagaaattgtgcctgccggcgaacttgacagcgagcatattgtaacgccgggcgttttcgtggagggtatcgtgcaaagtgaaggagtgaagtggagatgggcttgggaatagcggaaagagagagtatcgcgaggcgggccgccagtgaaattacctcaggtatgattgtcaacctggggatcggcattccttctttagtgccgaactttctgccggccggcatggaggtaatgctgcaggcggaaaacggcgtcctcgggatcggcggtagtccggagcgcggagaggaggatgagcttttatgcaatgcggccggatttcctgtcagtacagttaagggtgcttcctattttgattcagctctgtcttttgccatgatcagaaaagggctgatagatattaccattttaggcgcgctccaagtcagcaggacaggtgatctcgccaattggctcgtgccggggaaaaaggtgcccggaatgggcggggcgatggagcttgcccaaggcgcgaaaaaagtggttgtcgtcatgagccacaccgatcagaaaggccggccgaagctggtcgaaagctgttcattgccgcttacagcagcaggctgtgcagatctcatcattacagagaaagccgtcatcagcatagatgatggggcttttgttcttgaggaactgctgaatggcacgaccatagacgatgtcattcaaacaacggatgccgaaatcagattgggagaatgttttcttaaaagggggtctgtccatggatcaattagaaaagaaagtcactgagtgggcggaagaaaacacagcaaaagcggtaagcctgctgaaacggctgatcggggaaaaaagcacgttcggccatgaatttaacgcacaggcagtcgttttagaaaaactgagacagtttgacatggatattgatgtctgggagccgagtgtcaaacaattgaaagagcatccttattttgtatcggaacgcgaagacttccatgaaagcccgaatatcacagccgtaaagaaaggggccgggggcggaagatcactgatactgaacggacatattgatgttgtcccggaaggaaatcccgccgcatggacgtatgaaccgtttacagctgttgaaaaggacggcaaagtttacggacgcggttcaacggatatgaaaggcggcaatacagccctcttgtttgcgttagaagcgcttgaagcctgcgggattacgttaaaaggagatgttctgtttcaaagtgtcgtagatgaagagtgcggcggcgcgggaacactggcggctgttatgaagggctacaaggctgacggggcgcttattcccgaaccgactaatttaaagctgtttgttaagcagcaagggtccatgtggttccgcattacggtaagaggattgtccgcacacggcggcacccgctatgaaggggtgagcgccattgaaaaaagcctgcatgtcatcacagcccttaaagagcttgaacacgtccgtaacgcccgtatcaaagacccgctttatcgggacgttccgattccggttcccattaatatcggcaccgtccaagggggaacgtggccatcatcggtagctgaccgtgtggtgatagaaggcaggtgcggaatagcgccggatgaaacgcccgaagcagtaaaagaagagctggcaagctggctgaaagatttggagtaccgggatgaatggtttaaacaccaccccgcggaaatagaatggtttggggctcagtggcttccgaatgatctcccggatgagcatccgctgatttccgctctggaatcttcttttgagaaaatgaaaggggcaaaaccggttcgtgaagcgtccccgtggggaacggacggagggcttttgcagcacgcgggacagacgccggtcatcgtcttcggtccgggagaagtcaaggcggcgcatcaggcgaatgaatacattgaagtccgggcgttaatcgatgccgtcaaaatcatttctctttttatcatggaatggtgcggggtggcagatgggggtgacagcgctgataaaggaactgagggctgaaagcggagcggccgagattgatgcagaccgtttcaacgagcggatcagggtcattcgttatgacggacagcccgaggcgcttataccggccgttttggcagaagcaaaggaagagggagcccaaaaggtgattttctttgccaagcgcggcgatgagccggaatttgtcaagcatctttttattattgagggtgccatagacgggtattacaacgggcataaggctgttgtgatggtgcgctatttatcagaggaacggagacggtcagattcatatgtatcagaagattcggctgttgaccgtttatatgagacaccgcggcggggaatgactcagacagaaagcacgctgatgttcagaaaagcggacgaagatgatgcggaccgtttaacgcacttatataaacatgtttttcttacctatccgactcctgtttttaatcccctttatattaaaaaaacaatgaaagaaaacaccatctattatgccgcattcgatcaggatcgtctcattggggcggcaagcgcagatatcaatccggttttggggcacgcagaaatgaccgattgcgcggttctgtcagattacagggggaactccgtaacggcacacttgtttaaagcgttggagcaggaactcgctggccggggaatcattcatcttttttccttggcccgtgcagcgtcttacgggatgaacgccgttttgtatcatgcgggatacggctacagaggcaggcttgtgaacaactgccgcatttcagaagggctcgaaaatatgaatatatggtgcaaaactttacgtttggccattcataaggaggaattcgtttgacaaacaaatggtttcagccgaagcgtcactggaaggagattgaattgtggaaagatgtgccggaagaaaagtggaatgattggctgtggcagctcacccatactgtaagaaccgtcgatgacctgaaaaaagtcattcatttgaccgaagaggaagaagaaggcgtcaggatgtctgtaaaaaccattcccctgaacattacgccttattatgcttctttaatggatcccgataacccgagatgtccgatccgcatgcagtccgtgccgctgtcagaagaaatgcacaaaacgaaatatgaccttgaagatccgctgtttgaagatgaagattcaccggttcccggtcttacgcaccgctatcctgaccgcgttctttttctggtgacaaatcaatgctcgatgtattgccgatactgcaccagaaggcgtttttccggacagatcggaatgggggtgccgaaaaaacagctcgatgcggcaatcgcttacatccgggaaacgccggaaatccgtgactgcctgatttccggcggagacgggcttttaattaacgatcagattctggaatatattttgaaaaacctgcgtgacattccccaccttgaaattatcaggatcggaacgagagcgcccgtcgtatttccgcagcggataacggataacctttgtcagattttgaaaaaatatcatccggtctggctgaacactcattttaatacgagcatcgaactgacggaagaatcggttgcggcgtgtgaaaagctcgttaacgcaggtgttccggtcggtaaccaggctgttattttagcaggcattaacgattcggtgccgattatgaaaaaactcatgcatgatttagtgaaaatccgcgtgcgtccgtactatatttatcaatgtgatttgtcagagggaatcggccatttcagagcgcctgtgtcaaaaggattggaaatcattgaaggactgagaggccacacaacaggctttgccgtgccgacctttgtcgtcgacgccccgggcggaggcggtaaaatcgccctgcagccgaactacttgctctcccaaagtccggagaaagttgtgatcagaaacttcgaaggggtgattacatcttatcccgagccggaaaactatatcccgaatcaagctgacgactattttgaatctgtttttccgggaacaatggccaaacgcgagcctgtcggactgagcgccattttcgcggacaaagaggtttcgttcacaccggaaaatgtatcgaggatcgacaggaggaaaacgtttacatcaaaccctgatcatgaaacgctgaaagaccgcagggaaaagagagatgaattgaaagaaaagaaatttattgcacagcaaaagaaagagcaaaaagcaggatcggaagtcggaggtgagtcgccgtgaagccatgcgagtggtgcggcaatcagaaggcgtcagcttgtcaggcggctgtgtactgggagcttcctgacggtacgagagccatagaaattacagaaacacccgcattcgcctgctcctcctgcggcatgacgtatcaggaggaagcggtcatagcggaaatcgaaaatcagctttttttagtcgatgcaaaaaaattaccggaaacactcacatatcaagagctgatggggacagaacggatcttgaaacggaattattttgacttctcctagtcttcttttgttgtaatttcacacttgaattgtataatagtacaacaaaagacagtcatcaggaggggaaacccatgaaatccttttatcactatttgatgaaatacaggcatcccaaaccgcaggacgcaatcagccggtttgcgaatcaggcatacgaagatcacggctttccgaaaacgtcaagcgattatcacgagctcagttcttatttagaactgagcgccgactatttagaaacgatggcgacatttgatgaagcttgggaaaaatatgagaccgaggtgcatcacgcctgacgaaaaaccgcacattgtgcggtttttttctgttgaaatcaatcgcttatgaggtgccgtatgatcaaatcccgcaatgcctttcgttttgatcagcgcgtaaacaagtcttcctgatggcacggatcataaggcagcagaatgtatagctgcagagttcaccggatcagacctgctgccggcggggtcccgtgtaaggagcctcttttcacggagaaataatcaaacatttaaatgaagtgagaggaatcaaatgatctatggtgaggcactgacgtttggacggaaaagggaattttatgtgacaaggttgaagcggattgaagttgtggcttcattgaaagccgaaacgagtttggttcttcatgataaacaagccattgcagatatgcagccggaattggatctccatacatcttcgatgatgtgtttcacggcaaattttgaacatcacggcggtgatattgtcaacatgccttcgggccgggtatttatctttgtgtcatggagaaataaacaaaaactcattcaaaaacaggcgctttttgtctcgtcattgttactgctcattcgatcgagagcgcaatgccatcagacgcttctgttacggtaagtgaaaaaacgcacaagcatgttggggtttttgccattttgaacaggtgcagaaatagatatttcctgtggttttcatgcccatgcgaaattatggcggccggcatacgatagcgtatgacagtccgcggcaagggggagacagcatgaagccagataaaccgaaatttcaagtgggagacatcgtggtcgtcgtgatgtacggaaccgtcggcaccattacgaaggttcatcaaattgataaacattatctttatgaagtcaatcataatgaagtgctttattttgaatcgtccatccagctttataaagattatgagggcgtgatcgtcgatatggaaaaattagatattgaatatgaatttctgatcggcgacgtcgtatatgtaaaggactacggaaaggaattattccgagttatcggtcacagaactgaaatatggagatatttagaggatggctgggaggatattatttatgagctgactcggctgaaagacggagagtggcttgaaacggaggaagaggatctcacgctggttctgagaaaatatgaaatggatcagtttgtgcatcagctgctgtttgtccactatgttggggaagcatctcatgagatcggcgaggataccgtcgcgtctgctcttcttcagtttgaaggcgatgctgatgatcccgatgccctgcatgtgctggcggtatcgattgtagatgagctgcttgatatttataacgattataagattctttatcatttgttcggtgacgaagaatataaagatatgatgaattttgtgctggaaagcctgcgggagcatttcagctagccggcaaaaaaacggacggtgacatataaaaaccagggcagacagccggcaaagatgacaaacgacattcctttcagcactttttccaatacgatatcaaatccatctccgtccaataaagccatcattttcgtcattatcttttctccctccggggcttgtttttttaaaagtatatgagcggacaaaacgtttagaactttcgggtataatttgaacggttttttcataaaacataaaaaaggaggcggtgtttgcatgaaagaaatagatcttgtgattgacacagaagaaatagctgattatttttacagtcagcttgctatgcgcgggtacataccgagtgaagaggaaatcttcgaaatagccgacatcacctttgattatttattagaaaaatgtatgatagacgaagagcttgatgaagactgaaactgcggaaccgaagtgaaaaagcttcggttttttcaatcagctcgggagaatgaaacatggggggaaaacgttgtacaagccagcaagtcttttcgcattgtttattctgctcgcagcagcgatccggatagaagccgtccgggcttttgatgagcgtgtgatagaagcggctgtcaggatcaggtctgtctggctgaatgaattgatgttatggataacggagctcggcacgaccgcggtgcttttgccgcttcttcttttgacaggcgcagctctgtatatgtacaaaaaaacgccggatgttgtttttttgccgcttctctttctcattgaacggattgtaaacataaaaataaaagaattgattgaaagagccagacccgcttttgaaccgctcgtccatgaaacctcatacagttttccgagcggccactccatgaattcggcagtgatgtatcccgtcatcgcttactttttgatcaagcatgttccgtttttcacgaaaagaaagagggccctcaccgtctttaccggagttctcgtcattctgatcggattcagcagaatttatttgggcgcgcattttccgacggatgtccttgccggattcagtctcggactttgcctcgtttcgctttttgcgctctttgacgaaaagtatcatccgtttcgacaaaaatagagacaggaaaaatgagaaaaaacgctaatactattaagaaataagagggagggatcttgatgctgttatcgctgcccgtgtttaaaaaaaagacttgtgcctatgatgtgacgatttttcaaacaccccgctacggcgagaaaaagggatacagggtcgtctatcggacagagctggccgctgacaatcatcaagacgcactggaaagggcattttctgtttttaatgtgcctgatacggtcccaaacgactatcaagccagattcatagcgaccggagacgtcatactcatagacgaaggaagaaaaggaaagacctattacaggcttaaccctgcgggatggagtaaaattaaccggctgctcgtccagccgaggtaagacggagccggctgaagattcagccggcttccgtattgtctgggaaagacagtgttaaggcttccgtttagcggcggaatgctcttttccatgcgcttcatcagctgcaatgacgtctgaaacgggcacgtgattgttctttttctggccggtcacccggttgcgctgttttttgcccattatgttcactcctttttctttaggcttgtcatcccgcatattctgcccaagattgccctgatcaatgctgatgattgtctcttaccgttattcagtgtacaatgggtgggagtttgaataggcaggaggaaaaggaaatgagtgtacatataaacgcagaaaaaggccaaattgcggatacagtgcttttgccgggagatccgctccgagcgaaatttattgcggaaacgtatcttgaaaatgtggaatgctataatgaagtcagaggaatgtacggatttacgggtacatataacggcaaaaaagtatcagttcaaggcaccggcatgggtgttccgtctatctctatttatgtgaatgaactgattcaaagctatgatgttcaaaacttaatcagagtcggctcatgcggagccatccgtaatgacgtgaaagtgcgtgacgtgattttggctatgacgtcttcaacggattcacagatgaaccgtgtcgccttcggcagtgtagattatgctccttgcgcagacttcgaactgcttcataaagcgtaccaggaagcgcaaaaaaacaatcttcccgtagcggtcggaagcgtattcaccgccgatcagttttacaatgaagactcccaaatcgaaaagcttgccagatacggcgtcctcggcgtagagatggaaacgactgctttatatacgcttgccgctaaatacggcaaaaaagcgctgtctatcctgactgtaagcgatcacgtattaacgggagaagaaacaacggcagaagagcgtcaaacgacttttcatgatatgattaaactggcgctgcatactgtatcgtaaacttgagatgagggttatgctgattaaagcagccctcttctttatgcatcgccctgattcaaaaaaagaaaggtaagggtaaaatgaagaaatccactaaatggttctcgctcgctgccgctctcagcgtaaccgcaatcgtgggcaccggctgcagcatttcagacggcgacagccataaggacacaaaaacagcagctgaaacaaaacaatcagatgacacatcaagcaaaaaaacaacgaagacagaaaacagtgattttgtattagagagcaaatattttaatgatattaaagaagtgaacgggcttgagaccattcaaaacccgacaaatacacttgcgctcgtaaataagacatatacgctgccgggagattataaaccgaatgatctcgtaatcccgaaagtcgaattttcttttactgagaaaatcgagaaacgatatatccgcaaacctgccgccgatgctttggcggaactattcagcgccgggaaaaaagaaggttatgacctggttgccgtttcaggataccgttcttatgacagacagaaagttattttcgataatgaagtcagtctgaaaggtgaaaaaaaggcgaaagaagccgtcgcatatccggggcaaagcgaacaccagacggggcttgccatggacatttccagcaaaagcaacggatatgagctgaatgaggcgttcggaaacacggcggacggcaaatgggtgaaagaccatgcgtatgaatacggctttatcatccgctatcctaaaggcaaagaaaatgttacaaagtatgagtatgaaccatggcatttacgctatgtaggcaaaaaagcggcaaaagccatccatgaccatcaattaacgcttgaagaatattttaatgaagtaaagaaagtgtaatgagaagaagcccgcttgaaaaatagaaagcgggctttctttattaccagaagagcagacctccaagcgcaaatccggtaatgaaaccaaggccgataccgtaggctgctccccagcctccccagcctcctccccaataaccgaatccgtaccctctgtgacggccgccgacaggggtgatatacactttgctgttagtcacccgtacgattcttccgacgtggactctgccgtttcgttctgtaattcttgctacttttccttggtgctgccggcaaagatgataatagttttgcatcttttctcctcctatccaacctatctttctatgtcagcttatgatagagtgcggtaaaaaggttggacgaaaacaggaggacaattgccgttttacttgtaagcgacaaaagcgcagtgtcccatatattcacggtacgtctgcataagctcgtaatgagccgtcagcgtatcgtagtgaaccggctgaataacgggcgataaatccatttctgtagtcggctcctgcgcattgttttcatagacagcgggaatgaaatccgctttctgaaagccttgctgaagcaatctctgtttccatgcggtttcatcctgcaatacggtaaaaccgtagaagtcttttatctgcgtgatggcgttttccggcatgggcttttgtaaagcagcttcaatgccgatcagcatgcccccgggtttaaggacccgcaggatttcagacagcgatgaatcaagatttgaaaaggtgagaactgattcggaaagaacggcggaaaattgattttcagcaaacggcagccgctcaagctccgctaaatagcccggaatggttaagccttcagcggcaaatcgttttgctgctttttcaagcataaggggatccttatccacacaggtgacgggatacagcaggtggccgagataagcggccgtctgtcccgttccgcagccggcgtcaagaatcggttcgccaggaggaggagccgcttttgtgagaacggctttggaaaaagcgagcccgccggggtgagcccctccgactccgaataaggacagcatttctaaatatttgctcaaaggccgaatcctccttttttcctcagcatatgttgagagaaaagcataggtttgggtaaacgggaaagaagggcgcctcacgtttgaagttgacgaatgagcgttcgtctatgataataatgtaagaataaaaaggtggtgttttcttgaagcggcaatttaaactgttttttattatattgatcactgcggtcgcagcctcagcgcttacgctgtttatcacgggcaatacgaccattttcggacaaggctcggctgctttgacgaacagcaaatttgagaaattcaataaagcctatgagcagattaaaagtgattactatcaaaaaacagatgacagcaaattagtagacggagcgataaaaggcatgatcagttccctggatgatccgtattcttcttatatggatcctcaggaaggaaagtcgtttgaagaaacaatttccgcttcgtttgaaggcatcggcgcacaagtggaagaaaaggacggcagcatcctgatcgtatcgccgattaaagggtcacccgcggaaaaagcgggggttaaaccgaatgaccagatcttgaaggtcaacggcaaaagcgttaaaggccttaatgtaaacgaagccgtcgcattaatccgcggcaaaaagggaacaaacgtcaagcttgtgctgcacagagcgggtgtcggcgatctgaacctgtcgatcaaacgtgacaccatcccggttgaaacggtgtactctgaaatgaaaaaaggagacatcggcgaaatccaaatcacatccttctccgaatcgacggcaaaagagctgaattcagccattgacagcctcgaaaaacaaggagcgaaaggatacattctcgatttaaggggcaacccgggcggcctgatggatgaagccatcaaaatgagcaacatgtttatcgataaagggaaaaatatcatgcaggtcgaatacaaagacggcacgaaagaagtcatgaaagcgacgaaagagcgcaaagtgacaaaaccgacagtcgtcctcgtcaatgacggcaccgcgagcgccgcggaaatcatgtcggctgcgctgcatgaatcatccggaattccgctgatcggcgagaaaacgttcggaaaaggaaccgtgcagacggcaaaagattacagcgacggttctaccgttaaactgacaatcgcaaaatggctgacagcggacggagagtggattcataaaaaaggcatcaaaccgcaatatcaggttaagcttcctgaatatgcgaacctgccgtatttagatgcgaaaaaaacatacaaatacggggattccggaacgaccgtcaccaatgcgcaaaaaatgctgaaagcgctggggtacagcgtgaatgtaaacggcacgtatgataaagcatttgaacaagcagtcaaacaattccaagcaaaagagaagctgaaacaaacaggtattttaacgggagacacaacggcaaaactgatgacggatctgcaaaaacagcttgcggacaacgatacacaaatgaaaaaagccgttgaaacattaaataagaatatgaaatagtaaaaaacacccgatgcgtcgctcgcgcatggggtgttttttgtttgcgaaaagcccgtcttatgtcgtttcctgttcaaaaaggtggctgttcgcctgaatgaaaaactgtgattgctcatagtgataggtgacttttgagaaatcaaacggctggccgttggttaaatgaaaaatcgtttcaacgcaaagcttaggcgctcctgtaaacagacctaagtactccgcttcttcctcatttaacatccccgcgtacagatataaatctgaaaaaccgcgctttaacccgagaccgtctctaatataatcaaatatggattctgccacgatctctttattcaaatacgtaataatggatttgttgtaaaatgactcttcgatacacaatgtcagcccgtcaatatatcggattcgcttgacataatacacgtcgccgtcaggcggcatattcagattttgagcagcctcaggcgtgggttttctcacttccagcgctaataatttggaagtgacattaaaatcttcaagtgattctttaaatccctgattagaaagcagactgatatacccttttcttttattccgtctgacaaaaatgccgcttcccctcacttgaaacacaatcccctttttttctaataaatctaaggacttggttatcgtgcttttgctcacgttaaaccgggtcattaaggtttgcagcacaggcagtttatccccttgctgcagctgatgttcttctatgtatttttcaatatctatcgcgatttgctggtattttaacatatccattcctcattcatttattgtcccgcttctttcagaattatagcataatcgtttttaaaagccatttcgtaaattaactataattgtttatgtattgataaattataccggtacaattataatgtaaacgtataatatgaaaatgaaggcaggaattcttctacacctgcgaagcggtgcttgaagctgctgcagtgcatttattcggtatgcaagcggcagtcaaataaaggaggatataaacgatggggacattgccaaaagattttttatggggaggcgctctggccgcccaccaatttgaagggggatggaataaaggcggcaaggggccgagtgtagtggacgtcatgacggcaggcgcgcatggtgtgccccggaaaataacagatacaattgaagagcgggaattttatccgaatcatgaagcgatcgatttttatcatcgttataaagaggacatcgcattattcagcgagctgggcctgaaatgtttaagaacgtccatcggctggagcagaatttttcctaaaggtgatgaagcggagcccaatgaggaagggttggctttttacgaccgggtgtttgatgaattgctgaaacatgggattgaaccggtaattaccttgtcacattttgagatgccgctgcatttggcgagggaatacggcggtttcagaaacagaaaaacagtcggattttttgtgaaattcgctgaagtgtgttttgaacgctataaacataaggtgaaatattggatgacgtttaatgaaatcaataataagatggatgtgaataatccgatctttttatggacgaactcgggcgtcgccgttaaagaaaacgaaaacgcaaaagaagtcatgtatcaggccggccatcacgaactgctggcaagcgcattggctgtttcgaagggaagagaaatcaatcctgagttcaggatcggcgcgatggtatcacatgtcccgatttacccgtactcatctcaccccgatgatgtgatgctggctgaagaaacgatgagacagcgctttttcttcccggacgtccaggttcgcggatattatccaagctatgcgttaaaagaatttgaaagagaaggctatcagatacactttgaagacggtgatgaagagattttgaaaaatggccgagtggactacctcggattcagctattacatgtccactaccgtaaaaagtgacgtgataaacgataataccggggatgtggtaaacggaggattgccaaacggcgtggaaaatccttatattacagcgagtgattggggctgggcgattgacccgaccggtttacggtacacattaaaccgcttatacgaccgctaccagattccattatttatcgtggaaaacggattcggcgccattgacacattagaagaggacggttcaattcatgacgcttcaagaattgaatatttatcgtcacatataaaagctttggaaaaagcagtcacatatgatggcgtggatgtaatgggctatacaccatggggaattattgatattgtgtcatttacaaccggagaaatgaaaaaacgctacggcatgatttatgttgatcgggataatgaaggcaacggttcaatgaagcggcttaagaaagactcatttgaatggtataaaaaagtgattgaaacaaacggcgcatatgtatcctaaaggtgtaaaaagggaaggcttcaccgttgtgtgaagccggctttttatcagtaattatgaaagcgcattcattaaaacgggaaggaggtgactgtccggcttttcatttagaatcgcttataaaaataaggaaagggatggtggttcatgttttttaaaaaaagtctgcacatgaccctggtttttcttatgtttttctttttcatatcaagcagcacggaagccgaagtgtatgcggctgatcggaaggcttcagacaaaaacaaagtaagggtgtggttcagttctgaaaaagatccggcttcccgtacgtggtatgacgggccgctggaagtgaaatacgccttagacgaacaaacaccgcttacatggacaaaaaagaaggcttctgactccgccgccgtgtatattgatccgtcgcgccgctatcaaagtgtgttgggcgtaggatcgtccctggaagaatccacaatccataatttatcaaaaatgacacccgcaaaaagaaaagaagtgctgaaaaaactggttgatcccaaagatggtatcggcatggacgttatgcgcataacgatcgggacatctgattttacggcacaggaattttatacgtatgacgatatgcctgaaggccaaacagatcctaagctccgtcatttctcgatccaaaaggatattgatttacacattacagcaaccatcaaggaagcgctggcgataaatccggaactgaaaatcattgcctcaccgtggagcccgccggcttggatgaaaacgaatgaaaacctcaagcggggaaagctgaaagataaatatatcggcgcactggccgtttacttccgcaaatttattgaggcgtacgaaaagcagggaattccgatttatgcgatgacccttcaaaatgaacctttgctggaaatcgactatccgagcatgtacatgccgccgtctcaggagcgcaaactggcgatagccgtgaaaaaagaattgaaaaaacacataattgacacgaaaatttggatttatgatcacaatgcgagcggggcgtggaactatattccgccgattttagatgataaaaaaggaaaccgggcggcagacggcatcgcttttcacgattatgacggtgacctttccgtcatgtcggaaatcggaaagagatatcctgatcaatctattcacttaacggagcggtctgtctgggggacggcaggggcggatcggatcgcacagtatttccgcaacggcgcgtcgagctacaatgcgtgggtgacgatgctcgacagtcaaattaagacgcatcattggataggcaccccggacccgacgctgtttattcaggatgctaaaaaccctgaccgctattggaatatcccgatctttcatatgacaggcaacttttcaaaatttatcgagcgcggagccaaacggatagaaagtaattacggctccaaaaacacagtctcgaatgtatcgttccttaatcctgatcaatccattgtgacagtcgtaatcaaccagacatcttcagaacaaaaattccatgtcgtttcagaaaatcggcagtttgaagccgtcatcccggctaaaaccgtcgccacctacaaatggcagcacaaaaagtaaaaaagccggcacatcgatgtgccggcttttttctgttaagcgcctttttggttcagtttatcagagggcgctttattgaataaaccgtctttgacggcgtttgaagacgctttttttacaaaaaacgggttaaggataataacggcagccatgttagcggtcaacccccaaaacccttcatatataccgtgggcggattgggtgatatttaccgtgaatgtcacgataagaccgacgagaagaccgataattgtcgcttctttcgtttgattcttccaaaacagactgacggcgatagccggaaagatctgaaccatgccggaaacaccgagaagctgaagggtaacgagcgcagtcgggaacagcataccgaataaaagcgcgagcccgatgacgacaaataccattgaacgggtgatcatcgtcagcttgcttggtgacacattcgggtgaatcaaatcccgatataagttattcgcaaataagtttgatgctccgatggccatgatagagcagggaatcaatgacgcaagggcgatcgtggagtaagcaaatccctgtgcgactccgccgtaagacgtttgaatcagcttcaataaagcgagccgcggattggtatcttccggaaggacaagaaacgcgataaagccgagaaaaataacaagaatcaaaacaatattataaagcggcagaaacatgctgtttttgcggacggcatctgcgctttttgccgtaaatacaccggttgccgcatgcgcccacataaagagcgccagcgcagatacgatggaagctgtgataaaccaaggaattcctttcggccccgagtccggtatcgtcagcatttgcggcgctttttcagccaaagtgtgaatcatcggcgtccagccgtgaaaatggatcagcgggagtgagacgaccataaacagcataatcacccacaccagaatgtctttaataatcgccgtaaacgtcggccctttaattccgctgaaaaaagtatacagcgctacaagaataaaagagatgatgacgaccatattgacattaatgacacccgttccggccacctgaagcgtatcttgaatcccgctcagctggagacaaatataaggaatgagcataagaacgccgacaatggcgacaagactggccaaaagtttactgtcaaaacgctcacgggcataatcggcaagcgtcgttaatttgtgaatttttgccactttccacaatttcggcagaaagaaataagcgataaaatacgccaaaacagaatacgggattgcaaaaaaagcaacgcttccccctgtgtaggctgtgcttgttaagcctaaaaacgtataagccgtatagagatccgcgccgactaaaaaccagacgaggagccccccgaaccgtctgccgccgacagaccattcctcaacagaagtacgtgatgatttgtctcttccggctataaagccgatacagacaacggttaaaacgatgacggctgtaatgatcaatgctgttatatttgcgggcatcagtccagtcctccttgtttcttctgcagcctataaataagaaacgaacataatggagtgactgcgatccataaaagcagccagaaatgaaaaaagggcagcccgataatgatcggatgaacccgattagcgactgacagcagggccagctggctgaaagggattaagatgagaacgaaaattagtgcttttctgaccatttactttcctcctgaaacttgataatgctccttatcatagcaggtgtcagataagatcacaagatatttttcagaaaaaaaagaattctattacttttttaactgaaacactttagttgcatcttcattcatattaaattagaatagttaatatctcgaaatcaagatatttaggagtgaatacattgaatacacaaggattgcaccatgttaccgcatttgcaaaagatcctgctgaaaatcttcggttttatactgaagtgctgggtttgcggctcgttaaaaaaaccgttaattttgacgacccggccacttatcacttttatttcggcaaccaaaacggagagccgggcacgatcattacattttttccttttcagggaagccgcccgggaaccgtgggaaaagggcaggccggaagaatttatttctccgtgccgaaaggagcactcgcgttttggaagcgccggcttgaagaaaacggcttgtctgtaaaagaacagatcatgctgtctgaacaagtccttctctttaatgatacagaagacctgccgcttgccataatggaagatgaaagaagcggacagagtgaatggactccttcgggcattactgaaaaagaagcgatcacaggcatgagaggtgttcttctgtactcgtaccgtcctgaagcaaccattcaatttctcatagaacgcttcggttattcaaagacaggagaagaaaatcaaattgtcaggctgcaatcggaggcaaggatcggacatattatagatgttgaccttgcgccgaaagaagcaggtgccggcggttacgggacagttcatcatgtcgctttccgcacgagcgaaaaagagcaggcggagtggaaggatattcttgctgattctcatcttgcttcatctgacattcttgacaggtcatactttacttcaatctatttcagagaaagcggcggcattttatttgaaatggcaactgacgaaccgggctttatgacggatgaatcctttgaaaatctcggaacagagctgaagcttccggaatggctggaagagcatcgcagtcagattacagctgttctgcccataatggagaaaggagaatgatgatgaaacatgtgtttgaacagggaacgtcagaaaatgttctgctgcttttgcacggaacgggaggaaatgaacatgatcttctgtcgctcggacgttttatcgatccgaacgcaagtctgctgggggtcagaggatcagtgtcggaaaacggcatgccccgtttttttaagcggctgaaagaaggggtatttgacgagaaagatttaattgaacggacggaagaattaaagaattttattgatgaagcggcgcaaatgtacgggttcagcagagaaaacgtgattgctgccggctattcaaacggcgccaatattgcagcaagtcttttgtttcattataaagatgtactgaaaggagcggttctgcatcatccgatggtgccgatacgcggagtgaagctgcctgatatggaagggctgcctgtgtttatcggtgcgggaaaacgcgatcccctatgtacaaaagaagaatcggaggagctttatcagtatctgacagatgctcatgcatccgttgctcttgaatggcaggagggcggtcatcagctcacacagcaggaagccgagcaggcacgagcctggtacagtgagcgattcctataaaaaacccttagtctgcttaagcggactaagggtttctttcatcttacagccaagttgacactttagatacaggcagccggttgcttttatgcgccggcttaacggctttaccgattgaaatcagcatgacgggcacgaaacgctcgctcacgtcgaattctttaacgaattgctctttattgaatccgccgatcgcgcaagtgtcgtagccttttgctttagcggcaagcatcagctgcatcgctgctaaagaagcgtttaaaaatgctgaatcgcgggcaaactgatcattttggtatgcaccgttaatctggcctaaaagcgtttgtttaatctcttctgtgatattgccttgctcagccagttcagcataaacgtcttcaccattttcatttgcttttaagtcgcctaatacggcaataactgctgatgaatcaataatctgtttttgattaaaagcaaccggaagcagggcagcttttgcttcatcactgtgaaaaacttgaaaatgccaatgctgaaggttccaggcggaaggcgcttgcgttgtgatttcaaggagttctgtcaattcctcttttgtaatgaccgcgtctttatcgtattctttaacagatgcgcgttcctttaaaacgtctaatacggatgtcatcatgtttcctccttcggataaacgtgttatcataatagaaaagttagaagcttactaaatgtaacttgaaaactaattttaatggatcacaaaaaacttgtcaattcatagatgaagggatgaattcacgtgggatatacaatgtgtcctaaaatggaatccgctttttctcttttgggaaaacgctggaacggcctcattatccatgtactgatggacgggccgaaacgatttaaagatatgaccgaaacgataccgacaatcagtcaaaaaatgctcgcggagcggctcaaagagctggaacaaaatgaaatcgtcgagcgtcaggtgctgccagaaacacctgtcaaagtcatttataaactgactgataaaggcatggcactgcaagccgtttttcaggaaatgcaaaaatgggcagacagtttttgcgagcccgggggatctgccaacgacacatgtgatgaataataaaggctgcccaaggcagccttttcttaatgataatgtttaatcgtcataaaaaccattaatatcaaaattgttcagattgaggttcaagccttttaattgatttaataaagcatcgaatgtaaggaaatgatcatttttacattccgccggaacatcatctggagaaaatagttccattcctccctcaatccactgtttccggtataactgaaatgccgcttcaattaaatgatcaggcgttacaataaaccctaagcttacgtcatggtcctcactgtagccgaattcaaacccgcagcaagggcagatatcaaatgttttttgatattcgccgttataaacgggacttgtctctaatcctttaaatccgcatatcaaacaaggatacaactcactaaccaacatccatccctcttttattcagtttgaaaacatccaaaacaagcagggaggccttttacagtttcccggttaaaaactgagcctcaccgagcccgaagctccaatcggcgttcccgttttctgtaacggaaatcatgacgtcctcgggtgatatgccgcattctgttttaagctgatcagccatcagttgatataacgtttctttctgatgttcggtgcgcgctttgctgacaatgctgatgatgacaagagctttgcttcttttgaaaccgagcccggtatcttcaatgataagctcatgaggccgatgctggtgaacgatctgataacggtccgttactgggacgtcaaaagctttaaccatggcgtaatgggcggtatccagtaacttttttaatgctgcgtcatcccggccttcaataacgtcaaaacgaagtaatggcatattttattcccctgatggttttataatatcgtaacttgtaaaaaaagtataacagttaatcaaaatataatcaaattataaccaaaatgtttacatattaatgcaatattaaagagaggcacatgttgttacaatcgcccaatcaatttcctcattttatgaatacgcttaagaataggcagacataaaggaggaaaaacatgtaccctcgtcatgcattgtatcgcgggaatttcggtcctgccggatttccggcgagaagtccttttttgttcggcgctcctttattcggcggatttttaggcggtcttctcggaggcgtgattgccacaggttttacaagaccccgctatccgtacgggtttgccggttacggatacggaggcgtcccatacggcggtttcgggccgggagccggcggttatccgccattttattaagaaaaaacggcctgcatcgcgcgggccgtttttttatcttaaaatctccacttccgatagattgtagtcttcctgttttgaaaacataacttcaatcatcccgtctttatagactgcttttgttcctttccgtttgacgaggctcggaagtacgatttctttttttccttctcccaggctgctgttctctacaacgaggctgtgtgacgtatgcttaatcctgatacggtcgagttcctcttgttcggcgggaattttcgcaaaaacatgatcggatgtttcaaacaggtcaatttccggcttgggcggttccgcttcgaccggatcggcctttttggacatcgggtcgcgaaaagggaactgtccggcataaccggcgccgaatacgctttccatcactcggttgacatatgtctcgacatctttcggatcagcatttttaaacgtttctttagagaactgattttggaagggaaaatatctgttccaatcaaacacggcatctcaccctttcttaacggacaacatagtatatgcccgccggaagcttcccgtgatataatataatctgtttacagaaaggaaggggaaggccgtgcaagggaataacgtaagaaaaggaatcatttataccgcttgttctttcgtcatgtgggggctgtttccggtctattggaaacttcttgaacaaatacccgcattggacattttagctcaccggattttatggtcatttgttttcatgtgtgtgcttttaactgtgcttaagaagtggaaaaccggatggcgtgaactgcgtcttttgaaatcggaaggggcctgctggcgctttttttcgcttccgttttaatttccgttaattggtttgtgtacatatgggccgtcaatcacggctttttgcttgaagcaagtctcgggtactacattaatccgctcgtttccgttcttttgggcatcctattcttaaaagaaaagcttaacaagatgcaaacagcagccgtttctattgccggggcggccgtgctcatatctgcgtttcaatatggcgcggttccttatatcgcattgctgcttgcattcagcttcggtctgtacggcttatgtaaaaaaagaacccgcatgtccagcacgatcggactgacgctggagacgcttttgattaccccggctgcacttatttatttaggatatacagctgacgggagcacttttgggtccttggggcaggaacatgggcgctcctatttttcgcaggcgtatttacggccctgccgctgttattgtttgcagagggggcaaagcgtctgccgctgtatcaagtcggcattttgcaatatatagcgccgaccatcacccttatgcttggcgtatttgtgtatcatgaaccgttttccgggcaaaaagcgtttaccttcatttgtatatgggcagcattgcttttgtttaccttttcacagataaaatggaagcggccgataaaaagccgctaagcctttcgctttccagcgatagcttaaattatgtataatcattacgagtatgtaaaggagctgtacaatgggcactgataaagacatagcaaaagcctatcaggcactgtggaataaccgcactctcccggcttcaacccttgaagaagcggaaaaggcgattgatcttgaactgcttgatcaaagaacacatccgaggctccggaagtcacccgaggaaaagtttgctctggcggtgcagcgaattgtagattcccggctgcggccgattgagaaatatgaattggttgaactacatacgaagcgtttgcaatttttaaaagaagaaagaggggagcagctatgaaagcgatcataaaagaagatgtgcaaacttctttagagcgatatgccgatcgtcctgtatatatccatttggaaacaacgaccggttcttattcagcgcatctgaatgagaaaaatatgacggttgtagcctatatacgcaatgcaaaagtgacgtaccatcaggcgaaaatcaaaggaaacggcccgtaccgcgtcggtttgaaaacagaagagggctggatttacgcagaaggtttgactgagtatacagtagatgaagaagaccgtttgttaatggcggggcatctgccgggcggaaaattggcgatttcgcttcaaatcagcgaaaagccgtttacagtttaaagaaaagggtgaaaatcatgaaagaacatgtactcgtcatcctgcctcaccctgatgatgaatcatacggagtggcaggactgattgctttacacagacaaaaagatattcccgttacgtatgcatgcgcaacgcttggcgaaatgggccggaacatgggagatccctttttcgcgaaccgtgaaacactgccgctgttaagaaagcaagagctgattgacgcatgcaaagcaatggacattactgacctgagaatgctcgggcttcgtgataaaacacttgaatttgaagatgacgagtggctcgcggatatgatggaagagattatcgacgatgtaaaaccgagtctgattgtcacattctatccggagcacggcgtccatccggatcatgatgcatgcggcgaagcggtcatcagagcgctttacagaaagaaaaaagaggaccgcccgcgcacgctttgcatggcaatcacccgcaacagggaggaagccgtcggcaagcctgatgtcattcttgatattaaagaggttgccgatattaaaatgaatgccttaaaagcgcaccgcacccaaacggaaggcatgctgagagagctggaagaaaaattaaaaaataacgagccggttcttcagacatggtttgaagaagaagtgtattggacatatccgtggaaagactgataaaaaaagggataaggctgaaatgccttatccctttttttgtgtcagatcggaagcgatcgcttccgcaagcgaagaccgtattgataaatttgaaaaactcagtccgagctgcaccgcggtttgggcgatttcaggacggattccggataacgtcgctttcacgccgagcattccgagtgattcaattaaggtgaaaagctgttgggcaaccatcgtatcaatcatggctacgcctgataaatcaatgtacagctgcgtgatgcgcttctctgaacactggtgcagcgtattctccaaaatcattttggctcttgccgtgtcaatatccccgatcagcggcagcagtccgacattgtcaaaaagcacaattaccggcgagctcagctctgtaatcaattctttttgcgcttcaagctgaatgtttgtgtttttatacatttcctctatgaaaatatgaatgaccacatcaaacgatttaatcagcgtatggaatatatcttcggcatcttcttctgtcacggtgtctgaatgaagtctggtaaactgctttacatggccgacatacaaatcacgaactctgataaactcgcgaatgatgtaatggatgggagtttttaaatgttctttatcccgtgcggcttcaaacgcccacttttccaatgccgctgtatatacttccttctcttcagaaaaaatccgattgagttgataattaaacgccagattttgttttttcagatttgtgagaacagccgggtcagtagaagcataaacagaatcaggatccgtatcatgaagggtatcaaaccatgtctgactgatatcctccgcccgttcggttaaataatcgtacagcagtttatgtttcggcattgctgctcctcctttataaaatcatcatttttttcacataacgcttttgcagcttcatcagtctgaagaataaaccgacagctcctgcggcaagtcctgcaattaacccgatccagtagccgtatgccccgaggctcgtgtaagtgccgactgcgtaaccgagcggaagcccgataatccaatacgaaacaaaagccgcaccgagtgtatagttgacatccttatatcctctcagggcgccttgtatcggagctgctacggcatcagaaagctggaaaaacagcgcatagattaaaaagtgctgcgtcaacatgagcacctccggatctgatgtatacattccggcgatttgcggcctgaacagtaaaatgaaagccgccgtgcataaagaaaaacaaagggccatcacaatgccgatatagctgtatgaccgggcatccctgtaacgctttgcgcctgcttcaaagccgactaaaatcgtcatggccatggatacgctgagcggcagcatatacaagagggaagcaaaattcattgccgcctggtgggatgcaatcgtcaccgtccggaaatggctcattagaagtgtgacagccgcaaaaatgctcgtttcaaaaaataccgcaaaaccgataggcaaaccgattttcaaaagttttctgcattcagacggagaaaaacggtacagtttccgaaatacagagtacccggcaaacggctcaaatctgaagacgataaaaaagctgacggcgcaaatacaccagtaagtcagggcggaagcgagccccgcaccgactccgcccaatgccggcatgttgaatttcccgaaaataaatacataatttaaaacaaaattaataggcaatgagcaaagcgtaataagcatcgtgactcgcgttttgccgagtgcgtcaatgaacgagcgcaaaacggcgtacacaaacaaaggaaaaataccgagggataaaaagcctaaaaagtgtttggcgatcgtccggacacgaggttccaggcccaaatgtcccaagatcatatcaacggtgaaaaagccgaccaggataaccgccgcactgagaatggccgctacataaacggcctggatgacggaaaacggcacttccttttgtctgccggctccaaacagctgcgaaacaacgggcgtaacggccattaatattcctgcaaggcccgtatacaccggcgtccacaggcttgaaccgattgcaacaccggctaaatcggcggcgctcactttccctgacatcaccgtgtccaaaaaggtgatcagggcaaggcccgcctgtgtgattaaaatcggaatgaagatatgtaacagctgtctgaccttttggccgatcgtgttcgtttctctcaatttaggttccccgtttctttattttaacgagagaaattataacattttatgtataaaaagcaatgaaagccggcctactcttttttatccggtttcggctttttaaacatcttggcataaatgaatgaaagtgaaatgacccctaaaaaggtgcagatatattgcatcagccgtgcaaattccatatgatttcgcctcctttcatgattatggtgtacacagcggcgcatatccatgcgcgcgatgcagaaaataagggaaaggagatgatgtgacatgcgccacactcaaatgacggaaagcgcgtttaccgctgccgttcaaacgtacttgaaacaaattaccgaggatgccggaatgatactgcggacattggatgaaaaagaccaatgccttctttgcgaattagatgaactgggacatacgtttcaggaaatgcaggctgtcgcttcgtcgttttacctgcagtcatatatcgaacattttacgccttcctatacagagctggcgagggccgtgcagcatctggcggaagaaaagcacggagcgctgattgtgattgaacgtgcagatccgctggacggaatgatacaaaaagggaccagcctgcatgccgagatcagttcagctttaattgagagtattttttatcccggcaatccgcttcatgacggagccgtattggtcagagaaaaccgggttgtatcagcagccaatgtgcttccgctcacaacaaaacatgtcgatctcaaatacgggacgcgccacagggccgcgatgggactttcggccgtgactgatgcactcgtgctcgttgtttcagaagaaacgggaaaaatgtcttttgctaaagacggcggactgtatccgcttgtttcgccgcgggcgcttcatacgaaataataagaaaatgggaatattgtacccatttaatattaataaggtgaacatctttacctttttctgtattggtgttatcgtttaaatatacataaaatttaaaagaatagggagtggaaagatggcaaatgtattgatgatcggctttccgggagaaggccatatcaatccgtctttaggcgtcgtaaaagaactgaaggcaaaaggggaacatgtcgtatattacggcgtgaaggaatatgagcacaaaatcgcgtcaagcggagcggaattccgtgaatgtgaagatttccgaaaagatgaattcggaaaaaacgcaacgggtgatgaacagcgggatgctaccgagtttttactgttaatgattgagacttccgaaaaagccgcactccgtattcttgaggaagtaaaagatgaatcatacgactacatcctttatgatcatcattttctggcaggaaggcttgtgagaaataagctgaaactgccggcatattcactttgcacaacatttgcaatgaatgaagcatttattaaagaagtgttttcaaatacaaaccttatatcagaggaatcatctcattatccggcttataccgaagcggtcagccggcttaatgaagaattcagcgcagacattaaaacgccgtatgatattttctcaaatgacggcagaaaaaccatcgtatttacttcaagagcgtttcagccgaaagaagaagagtttggcgattcttatctctttgtcggtccgtccataactgaaaggccggcggctcaggatttcccgtttgaccagcttgaaggagaaaaagtcctgtttatttcaatgggcacgatttttaacaatcagaaggaattgtttaataaatgcttaaaagcggtcaggaactttaacggaaaagccgtcatgtcaatcggcaaacatcttgatccggcggagcttgatgaaattcctgagaatgttattgtaaagccttatgttccgcagcttgagatcctgaagagagcggacttatttatcactcacggcggaatgaacagtacgagcgaagggctttactacaaaaccccgatgatcgtcattccgatgggagcagatcagttcgccgtcggaagccaagtggaaaacacgggcgcgggcaagatgtttaaaaaagaagatgtaacagcggaactgctcactgaagcaataaaagaattgagcgaaaatcctgaatatcagacaaaagcttctgaaatcggagaatccctgaaagcggccggcggagcacagcgtgcagcggaattgatagcagaagacgtgaaaactgccgagacccgggttctgtaatcagccgtcacccgcttcctttataggaagcgggcttttttttgtttgtttttcgggaggattttcacgccgtgaagagaattgtatgaaaaacagacaagaaaggtggaatgtcgcggaaaaaagccatgttatgaaaatgattccaaagtcttttgtgaaatgttctcaatttatgtaaaatgtgtggcattggtgatgatctaagaccaaatgaatcggaattaatgtcgacttctgaatgaatcctgcataacaggcggcgtccaaagaaaaggaacgtccctttcagcaatgataaataggaggtttttcgttatatgaagaaaaaaatcgcagccggactggctgtatctgcagtaatgacttcaaccttcgccgtgcatcccgctgaagcaaaaaccattcaagtaaaaagcggcgactctctttggaagctttcccggcaatatcatacaagtatttcagccctgcaggcggaaaataaactgaaatcaacgatactccacccaggacagcggctgcacattcccgacgggagcggcacacataaaacggggcaaaaaggaaaacgaaacactggtgcttacacagttacatacggagactcattatgggtgatcgctaaaaaataccgaatgagcgtttctgaactgagaagcctgaaccgtttgagttcagatatcatctatccgggccaaaaactgaaaattaaagggtctgccggcggcacggacggaggcggcagacagacaaagcctgataaaggcgcatcagggacttacactgtgaagccgggtgactcgctgtggaaaatcgccaatcaaaccggcatcaccatcgccgaactgaaaaagctgaatcaattaacatcagacatgctgtatccgaatcaagtattaaagatcaaaggttcttcacataacggaaacagcggcacaacaccgccatctcattcaaacccttctgagaagccatccacttacaaagtaaaagcaggcgattccctctggaaaattgctaatcggttcggcatcaccgctcagctcatcagagaaaaaaataaactgacaactgatgtgcttcaaatcggacaggttctgttgattaacggaacgggaaaaacagaagatcctgtgcggcagccgggtaacaaaccggcaaagccaaacaagccaaatactcccgaacctccggtgacagggtcaaagattgacagaatgataggcgaggcgaaaaaacatgtcggcgtgccttaccgctggggaggcaatacgcctgcgggcttcgattgcagcggttacatctattaccttttaaataaggtaagctctgtttcccgtctgagcacggccggatattggaatacgatgaaacatatcagccagccgtcagcaggcgactttgtcttctttacgacatataaagcgggcccttctcatatgggaatgtatttaggcggaggagattttattcacgcaagctcctccggggttgaaatttcaaacttaagcaatccatattggaaaaaagcttatttaggagcgcgcagttatttttaaaaaaaagcctttcggggctttttttgtttaccattttcacgttttgacaagactgatgggtaaaaaaataagggggaggaagcatgaatcgtctcttgctttttctcatgctcgcatcaattacgctttgcggctgcggggcgagacccgctcctgctccgcccaaaaaacatggggaaagccgcgcattggaagcatctgcataccgtgagcatgccggactcatcaatcaaaacggaaaaacgatcggatatatcgaagtgagggaatctgatgatgaaggatcagacattcatatatcagcgggacatctgccgcccggcgcttctctcggatttcatatttatgaaaaagggacatgtcaggcacctgatttcgaatcagccggcggtccgttcaaccctttgaacaaagaacacggcttcaacaatccgatgggtcatcacgccggagatctccccaatcttgaagtgggggctgacggtaaagtggatgtcattatgaacgcgccgcaaacttcattaaaagaagggagcagactcagcctgctcgaccgggacggaagcgcgttcgtcattcatgaacatacggacgattatttaacaaacccgagcggaaattccggagccagaatcgcctgcgctcccctgacaaaaagcgcccgcagggaatgagcccttttgtattgagtatacaagggcttttttagtatactcggttatggaatacaaatggaaaggaaacatcacctatgacttcagaattacagcacctatcacttccggaagatatacaaaacaaactgcaggcttatcaaaatcatcccgtttcccaagaattccgggatttaatcggatcatcaggctatgaggccgaagataaagcgattgtattcgatgccgtcatcgctttgacaatgggaaaaaatatcttattaaaaggaccgacgggttcgggaaaaacaaaattggcggaaacgctttcgaactattttcataaaccgatgcacagcgtcaactgctccgtagacctcgatgcagaagcgcttgtcggctataaaacgattgaaaatgaacaggggcaggcgacaattgaattcgttcccggacctgtaacaaccgcaatgaacgagggacattttttatacattgatgaaatcaatatggcaaagcctgaaacccttccgattctaaacggcgtgcttgattacagaaaaatgatgacaaatccctttacaggagaagtgattaaggcaagcgaaggattcggtgttatcgccgcgattaatgaaggctacgtcggcaccgttccgctgaacgaagcccttaaaaaccgttttgtcatcattgatgttccgtatattaaaggaagcctcctgaaacaggtgctgacctctcagtctgtcttaaaagatgagaaattaattgagcgctttatgacgctgtcttctgatttaatcgcacaagcgcataacggacaagtgtcagaagaagcggcgtccatcagggctctcatagatacgtgcgacttggctgcgtacatcccgccgaaacgggcgattgaaagaggcatcgtggaaaaacttgacgacgacagggaaaaagccgctgtcagaaatattgcagaaacgctgttcgaatgagggatatacaatgaagtttatcaaatttaacgacagcacgattgattcgtttttgttcatgatgctgactgatctggccaaaacactgaccagaagcagtgaagttgaagtggaatacggcgtgcagtcttactacaatccctttgaaaagaaaatttacatgagccacttttggaaagaccgatcagccggggatatggaagccggcctgaaaagcgatgtctatttgcgcgctgtcggaacacgcagcagctcatttcgggtatttgcggggtttttaaatgacgttcaccggcacttcacccgccaaagctttgccaagcagctgtttatgctgcttgaggatatcagaattgaagagcagatcaaaaaagaacggccgggaacgaaacgtgtttttcagaagcggagggagatgtacaggaaatatttcacgacgcagctgacattgaatttagaacggagcattttcaccgacgctttgtattgcgcgatgtttgtcaagctgacggctgagtctccgcttgaaggcattccttccatgcatgaaaatattgatatgatgataccgtatattgaacgtcagctcatccgggtgtatgaggcggattctacggaacaaatcgcaacaataacggaagacctcatggaaggccttgatgaagtgcttgagaaagatatgctgaacacatacttttttctgccggaacttgattacgaaaaagcggctgaagagcctttattcgaaagcgtaaaaaaagcgccttcgttaagtgacgatctcacgctccctgagtcttccgacggagatgaagaaatccttgaagagaaaatgaatacgtggcaccgggaaaccgaagcgccgtcaaaaagcttccttcaatttgatattgagcacggcgcgaaatcagatcttgggaaagacgcggccagagaaggcgatgacggtgaccaggcgctcggctccgttcaaggttccgcacgtcagacgaaaagagaggattactctaaactggaagcgcttgaatccattcaggatgaacatgagggcgccgggctggctgacggaaaagaaaacaaatttgccttcccggtttatcaaacgcctcaaaaagcgtctcctgaagaggagcagtcttataaagaacaggcaaaaacgatagaatcatatcaaaaacgcctgaagcagatgatacaaaaaacacttgagcacaaaaaaacgctcccgcggaccgaccttcacgcaggccggctgaatcgcaaactgatccgctattttacggaacggaacccgcgccttttctataaaaagcaggacccgtcttcagacattgacgccgtttttacattgcttgtcgattgttcggccagcatgtttgacaaaatggatgaaacaaaaagagggatcgttctttttcatgaagccttgaaatcagtgtccgtccctcaccaaatcgtcggattttgggaggatacaaacgaagcgaccgaaacgagccagccgaatttcttcaataccgtcattccgttcgaagagtcgctgctgcaggctgcgggtccgctgatcatgcagcttgcgcctgaagaagataacagagacggatacgccatcagacaaatgacgaaacagctgatgcggcggagtgaggcgcaaaaatttttaatcgtgttttcagacggagagccggcagcattcggatacgaacaaaacggcatcgtcgatacgagcgaggctgtcatcgaagcgagaaaaaaagggatagaagtcataaatgtttttctgtccaatactgcgatagaagaatcccagatgaaaaccattcaggatatgtacggaaagtacagtatttttgttccggatgtcgatcagctgcccgatgtgctgtatccgcttttgaaaaaactgcttcataaaagcataggataggctttttcctatgctttttcgctttttattttaaaatgatttaattttttcggtattgatctgttttttttactattttgtgaacaatcaaggtagaatccaaacgcaatcagtggtaaaatatccttggaagcgtttttattacataattttgggcacagcgttcaaaagttatttcaagatagtgaattgatcacttgattatctaggttgggggtaatattcaaatgtttcaaaataatatgaaacaaagaatgaattgggaagatttttacggaccgaacctcggctacgcactggagctgtacgaccaatatgctgaagatccagacagcattgatccggatctgaaagacatgtttgacgaactaggcgctccgccaagccaaataaaagaggcatcggaaacaaaggaacagggacgcgtcaccgcagatctgattcaaaagatcgcagcagcagttaaacttgcagaagatattcgaacctatggccatctgaacgcttccgtcaatccgctcagaaaggatccgaaaaagagcgagctctttccgttatccgagtacgggcttacagaagaagaaatgaaagcaatacccgcgtctgtcatctgtaaagacgcacctgccaatataacaaacggcttagaagccatccagcatttacgcaatacctataaaagaaccatctctttcgagtttgaccatgtgcatgatttcgaagagcgcgcatggattacaaaaatggtcgaatccggcgaactgttccggaaaaattcaccggaaaaactgtcagccgttttagaaagactgacggaagtagaaggatttgaacaatttttacaccggacattcgtcggtcagaagcgtttctcaattgagggattagacgcgcttgtgccggttcttgacgacattatcgcccagtctgtgaaggcgggcacaaccaatgtcaatatcgggatggcgcacagaggccgtttaaatgtgcttgcgcatgtgctcggcaaaccgtatgagattattttctcagaattccagcacgcgccgaataaagaccttgtgccgtctgaaggatcgaccggcatcagctacggctggacgggcgatgttaaataccacctcggtgcagacagacagcttcaggatgctgaaaccaaaagcgcgcggattacgcttgcaaataacccgagccacttggaattcatcaatccgattgtggaaggaagcacgcgggcggcacaggaaacaagaacgcaaaaggggtacccggttcaagacgaaacaaaatcgctcgccattttaattcacggtgacgcagcgttcccgggagaaggcattgtcgccgagacgctgaacttaagctcactgaaaggctatcaggtgggcggggccattcatatcatcgccaataatatgatcggctttacaactgaaagcgatgaatcacgatccacaaaatatgccagtgatttggcgaagggctatgaaattccgatcgttcacgtcaacgcggatgatccggaagcatgcctgtcagccgttaaatttgcggttgaataccggaagcggttcaataaagatttcttaatcgatttaatcgggtacagacgatacggccacaatgaaatggatgagccgtcaacgacacagccgatgctgtatgatgccgtcagaaaacacccgactgtcaagcggatctttgcggaaaaactcgtaagtgaaggactgatcagcgaggaaaaagcgcaaaacatcgaaatggcagtgacaaaacgaattgaagacgcctataaaaaggtgcccgccaaaaaagaagacgccgtacgggaaattgaattgccggagccggtgtccaacggttttccagacgttgacacagccattgattttgatgttctccgcaagctgaatggcgaacttatcaactggccggaatcctttaacgtgttcggcaaactgaaaagaatcctggaaagacgtgcaaaagcgtttgatgatgaccgtaaagttgaatggtcattggctgaatcgcttgcgtttgcttccattttgaaagacggcacgccgatccggctgaccgggcaggattcagagcgcggaacgttcgctcaaagaaaccttgtgctgcatgacagcgaaacaggagaagaatttgttgctctccatcacttagacgactgcgcttcttcatttacggtgcataacagcccgctctctgaaggatcggttctcggctttgaatatggatacaacgtgtattcgcctgaaacgcttgtgttgtgggaggcgcagtacggggactttgccaatgcggctcaagtctattttgatcaattcatatctgcaggacgggcaaaatggggacaaaaatcagggctggtcatgctgctgcctcacggttacgaagggcagggccctgaacactccagcggccgcgtcgagcggttcctgcagctggcggcggaaaacaactggacagtggccaacctgacaagtgcggctcagtatttccacattttaagaagacaagcgaaaatgctgcttcgtgaggaaatccgcccgcttgtgatcatgacgccgaagagcttgctgcgcaacccgaatacggtatctgaagtgcaggaactgagcgaaagccgattcaagcctgtctatgagcagtccggtctttcccatgcttacgaaaaagtgactcgcgtcgtattatcaagcggaaaagtgtcaattgatatcagcgatcacttcaacaaaatggaaggcgataaggattggcttcatattgccagaatcgaacagctgtatccgttcccggcaaaagatacgaaggagcttttcgccaaactgccgaacctgcaagagatcgtttgggttcaggaagaaccgcagaacatgggggcatggagttatatcagcccgtatctgacggaaattgcgccaaaaggagtaaatgtccaatacatcggccgaagaagacgatccagtcccgcagaaggagatccgacagtccacaaaaaagaacaggaacgcattgtatctgatagcttgactcgcaaaaactaagggggaaatgtaaaaatggcggaaattaaggtacctgaattagcagaatcaatctcagaaggaacgatagcccaatggttaaagcagcccggtgattatgtagaacagggtgagtacttgcttgaactggagacggacaaagtaaatgttgaattgacagcagaagaatcgggtgttctaaaagaggtattgaaagattcgggtgataccgtccaagtaggagaaattatcggtaccattacagaaggcgctggcgaaagttctgcacccgccccttcagaaagtgctccagccaatgaacaaacgaaagaggaagcaaaagctgaacctgctgcacaagaagtcagccaggaagcacaatcagaagcgaaatccagaacggtagcgtctccggctgcacgcaagctggcaagggaaaaagggattgatctatcacaaattccgacgggggacccgctcggccgcgtgcgcaaacaagatgtggaagcttatgaaaaaccggcttcaaaacctgcggcacagccgaaacagcaggctcaaaaaacacagcaaagctttgacaaacctgtcgaagtgcaaaaaatgtcccgccgcagacagacgatcgcgaaacgattggttgaagtgcagcagacttctgcgatgctgactacatttaacgaagttgacatgacggccgttatgaatctaagaaaacgccgtaaagaccaattccttgagcaaaacgatgtaaaactcggtttcatgtcgttctttacaaaagccgtcgtggctgcattgaaaaaattcccgctccttaacgctgaaattcaaggcgatgagctgatcgtgaaaaaattctatgacatcggtatcgctgtcgcggctgaagaagggcttgtcgtcccagtcgtacgtgacgctgaccgcctgacgtttgccggcattgaaagagagatcggcgaacttgcgaagaaagcgcgaaacaataaattaacattaggtgagctgcaaggaggctccttcacgatcacaaacggaggtacattcggatcgcttatgtcaacaccgatcctaaacagccctcaggtcgggatcttaggtatgcacaaaattcagctgcgcccagtagcaattgatgcggagcgctctgaaaaccgtccgatgatgtacatcgctttatcatatgatcacagaattgtagatggtaaagaagcggtcgggttccttgtcaccattaaaaacctgcttgaagatccggaacagctgctgctggaaggataatttgaaacagacaaaaagtacactgcccttacaagcagtgtacttttttattgagcgaaggggagaatttatatgaaaagctgttatccgcttgagatcgaatttgaatataatgaagaattgcattctatcactccggttcttctgcaagacgaacatgacacgatattaatagactgcggatatcccggttttacaaaccatcttcaacatgctgctgcccggcatggaatgtcgcttcattcattgacaaaaatcattgtaacgcatcacgacatagaccatatcggctcactcgctgcattacatcgtttgcacccggatatcagcgtgacagtacatgagcgtgaagcgccgtatattgacggctctaaaaaatctttacggcttgagcaggctgaatcaacgtttagttcattgccagaggatgcaaagccttatgcaaaacagttcatttgctcgcttcaatcagtcgaatcggctccagttcaccggacagttactgacggtgagctgctgccttggtgcggaggcattcgcgttgtagccacgccgggtcatacacccggccatatcagtctttatctgcctgccgaaaaaacaatgatcacaggtgatgcggtcgtcattgaagacggaaagctgaaacttgctaatcctgactatacgttacatatggatgatgcggtccgatctgtgcagcggctgcttgattacgatatccgccaattgatttgttatcatggaggtttatttcagggggatgtaaaaaaagcgcttttgcgcctgtttcgtgatctgcagaataatcaaggataggagcggcggcagcctatccttgttcagttatgaaaacggaatctttgccgtttcttcttcggcgctgtttttctcttttttcttagaccagtaggtggcaagaacagaccccgacagattgtgccatatgctgaaaattgcgctcggcacggctgacaaaggggagaaatgcgctgtcgcaagcgctgcgcccagtccggagttttgcattccgacttctatcgcaatcgctttttgtgaagcataatccattctgaacagctttgcagtcaggaatcctaacaaatatccgattccgttatgtaagatgacgacagacacaatcagcagtccggattgaagcagatgctcacgatttacgctgacgacagaggatacaatcgctacgatgccgattaccgatacgagaggaagtgcgtgcacggcttgtccgacctgttttttgaagaacagcttcacaatcaccccgaggacgatcggcaaaagcacggcttgcataatggaaacaaacagtgaaccgaaagaaacgggaagccactctttcgcaaacagcataataagtgccggcgttacaataggagcaagcaatgttgagatcgtggtgaccgcaacagaaagcgccgtattgcctttcgccaaaaacgtcatgacatttgatgccgtaccgcccggacagcatccgaccagaatgacgcccgcggcgatttctgcggggaggcggagcccgactgataaacagaaagccgcaagcggcataatcgtaaactgggcagcgactccgatcacgacatgccaaggctttctgattaattctttaaaatcgtctgcttgaagagtaagccccatcccaaacataataataccaaggaaaatcgtcatataagaactgatccaagaaaacaaatcagggcaggcgaatcccaaaccggcaaagacgataacccacaagccaaaggtttggcccgcaaacccgcttatttttttcagccattccataaacacagctccttttacatccaatcaatcagtcagaaaatatgactgacttttctgtactccattataaataatattctgaataattcaatattaaatataagttttcgataaaattattatgtaaactaatatcttcttgactattcagacatatattcttacaattgatttttatactgaaatgaattgggagtgctgaagtgaaagaagctaatcaatggtcatctaagctgggatttattttagctacggccggctctgcaatcgggctcggcgcaatatggaagttcccttacgtagcgggaaccagcggaggcggcgcttttctgcttgtttttattttatttactgttttaatcggactgccgcttttgcttgctgaatttattatcggcagaaaaacacaaaaaaacgccgttgaatcctataaggcgctggcgccggggaaaaagtggcactggatcggatatctcggaatcataacgtgttttattctattatccttctacagcgtagtgggggatggatattaatctacattataaaaggctttacaggcggtttaacgctttcttcgggatttgatacgttatttatcgataccatttcaaacccttatgcagcggttttcggtcagctgctgtttatcgtgctgacgattttagttgtggcaaaaggggtgagcagcggcatcgaaaaggtaagccaggtgctgatgccggctctgtttattctgtttattcttttaatgatccgctccgttacgctgcatgatgcagcgaagggattaaaattcttcttcatgcctgattttggcgcgatggatgccaataccattttatatgcgatgggtcaatcatttttctcgttaagcgtcggagtgtccgtaatggttacatacagcgcatatttagaaaaagaagaaaatattgttcaatccgccgtatcggtgacggtattaaatgtccttgttgccgtgatggcgggagtggcgatttttccggcggtatttgcattcggtctcaagccggatcaaggtccgcagcttttatttaacgtgctgccgaccgtctttaaccaaatgccgttgggcatcgtgtttttactcgcctttttgctgctgtttttatttgcgacgctgacatcggctttttcaatgcttgaaattttagttgctgttttgtcaaaaggcgattcggcaaaacggaagcggtatgcatggatcgggggacttgctatatttattgtcggggtcccttcggcgctgtcgtacggcattttgagtgatgtttctatttttcaccgcagtatttttgacgctgcggattttctggtcagcaatgtcttaatgccgttgggcgcgcttttaattgccgtgttcgtaccgctgaaaattccgaaacagatgctgtttgacgaactgaaaagcggttccggtataaaacgaaaatggtttgcagtctggctcctattaatccgttatgtggctcctgtagccattattatcgtttttctgcacgtgcttggtattttttagaccaaaagaagcaggcccccgttcaagacgggggccttttttaataaagcggccacatcacgcggtgcgcttgctcgaaccgtttctccgcctcccgccaatcaacgacattccaccattgatccacgtaagccgcgcggtcgtttttatattgtaaataataggcgtgttcccatacatccagcggaagcaaaggaatgacgtcccattggctgtagagctgatgcttctcagcggccaaaatctccagccgcccggagcgcggcgcccagacaaggatagcccagccgactccttcgactttttttgctgcttgagaaaattgctctttaaaagcggaatagcttccgaatgacacatcaatcatttgaaagagcgcacccgtcggccgtctttttccgtttggattcatggaaaaccaaaaaatactgtgcaaataatggccggcaccgtgaaacgccaattgccgctcccaatgcgccactaagtcgtactgtttcgtttgtctcgcttttttgagctccagttctgctttattcagaccgtcaacatagctctgatggtgtttagtatggtggagtttcataatctctcttgaaatatacggttccagtgcggaataactgtatggcagtttagggaggacatgcttgccgatcggcacataggctctgcgctcatccggctcttccggttcggtaatgtcccggtaaagtgctgatgcctgttcgtaccattccgcctccgttaatccatcatcctgaagggtgtgaaaaatccggtcgatttgtgccgcgaagcgatcgaaccgaccttgctgtatgacttgttccttcaaggtttcacaccaattcagcatttcggtttgataagcgtgccgtttcatttttcttcctccttttcactcactttcataaaagtgctgagcgcaagcaaagaaaacacatacgggtagctgtgatacctgatgtaaaactgtttcggcaggccgattccggtcggatagctgaaagcgtctccttcgtaatgccggttttcaataagaaaagatatgccttttgtgacggcttgatgatgaggtttttcgtattgcagcaaagcttcggccgcccaagccgtctgtacaagcgtcccgtaagaaagcggaacataggttttgacttctgcgcttttacaggattctccccagcttccgtcctcgttttgaatggacttcagccagcggatcgcttttttcacggccgggtggttttggctcacgccgcaagccttcatccctgtcagcgctgcccatgtgccgtaaatatagcagacaccccatctgccgtaccacgatccgtcctcttcttgatggcggatcagccattggacggccttttcaatctgagggtgatcaggagaaagccccgcttctcctaaacagtgcagcacccgtccggttaagtcgcttgttgaaggatcgatggcagcttcctcagccgattccagcggcagcaggcggaccagcggatgattgacatttttctcaaaagcagagaagccgccgtcactgttttgcatggacaaaagccagctcagtccgcgttcccatgaggcgggataacgttttcgcgggatggctttgagcactgcggctgtgtcatcacaatcaggattatttgtattaatgtttgaaaaaccccatcctcccggttcagcatgcgggttgtgaacggcccaatcagcgactttcgtctgctgccgttcacgcagaaaccgggcggctccggttatcatttgatcgttatctgagatgccgcttttcataagcgcatagctgagaagcgccgtatcccaaacggtcgacgttgaattttccaggtacggtatatcgctgcaagacgtgagcaaagctttcgtgccggcaagcgcttttctgataacgggggagtggcgcgatacaccgagagcgagcaggccgtacaccataaaaatagtggcactcgcatagctgtataatgtgccgtcttcttcaatccggtcaagcatatacgttttggccgtacgcagaccgagctggtgaaaagcggcaggaatctgcaaaagccgcttccagtgcgcgaaaagagaagagaggtctctgttctcatcatgatcggaacgaagccatgtaaacggatttttagtcatatgccgatctaaatgcgcgagagacggaacattgggatttttcagcgaaaatcttttgttaagcgtcacggccatcggtacgaaatgaatacgagcgtatgtactgaactggtaaaaatgcagcgggaaggatgggggaatgactaagaaagataatggcagatgcagcgcgggccatgggtaaaggccgtttgccgcaagcatccactttgtcatgaagtgtacgttgcgcaagccgccatttgagatgataaagcgttcagcctgaatcatatgcgcctcagaacggctatataaaccggaagccagcaagccggcatagccctgtacagtagcggtcacatttcctttccggtcatcaggatagttggcaaaagttccgtccgggcgctgtttagcgcgaatgccttctgcaagctcagcgatcagttctttatcattgtctccaagagaagtgagaaggaggatcagaaaggcgtttgtcaaaatcggaccttcaaaacaaaatgaccatgagccgtccgcattttgcgtttctcttaatagggagatggttttcttttggcggcttctgacgttttcatgaattgtgctcacactcgctcaactccttcagaagcatatatattcatatgtaaaaggcggcatgacaaaagaaagaaactgctgacaggcagcagtttcttgtttgatttaatcttccaggttgatccagacgcttttcacttctgtataattattcagcgcgtaagagcccatttcccgcccgaggccggattgcttatagccgccgaaaggagatgccgcatcgaaaacattgtagcagttgacccaaacggtgccggcttggagacggtcagcaatgtaatgagcgtttttcacattttcagtccaaagtccggctgcaagaccgtattccgagcggttcgcccgctcaatgacttcatcaaccgtatcatacggaatggcggctaagaccgggccgaaaatttcttcttttgcgatggtcatgctgtcatccacatccgcaaatacagtcggggagacaaaatacccttcttcaaacgggcagctgccgcccgcgacagctttggctccttccgcttttcctttttcaatatatgaaagcacgcgctcatgctgttcctggctgacgagcgggccgatttgtgtatcttggtgaaggccggcgccttgctgaagcgatttcgcatatgaaaccatttcgctgacgacctcatcatatttgtctttgtgaatgaagacacgggagcctgcgcagcatacctgtccctgattaaacatgaccccgtttaaagcgccgggaatggctttcttcaaattggcatcaggcaaaatgatgttaggtgactttccgccaagctccagtgtcacgcgtttaattttttttgcggctttttccatgatttttttgccgatttctgtagaaccggtaaaagcgagtttatcgacatcgtcatggttggtcagcgcttccccggccgtctcgccgaaccctgggacaatattgatgacgccgtcagggaagcccgcctgatctattaattccgctaaatagagggcggtcagcggtgtctgctccgccggtttcaaaacgattgtgcagcctgtggcaagggcggcgcccattttccacatcgccataaggagcggaaagttccaagggatgatctgccccacgacgccgacaggctcatggcgggtgtaattaaaatatgagccggcgaccggaatcgtttgtccggttatctttgtagaccacccggcataataacgcatatgctcaattgcgagcgggatatccccattcgtcgtttcattaatcggttttccgttatcaagtgtttcaagctgcgcgagttccgttttgtgctcttccattaaatcggcaagcttatacatcagcctgcttctggaagcggccggcatagtgcgccattcgccgtgatcaaaggctttgcgtgccgctttcactgcactgtcaatgtcttctgtctgtgcctcgtaaagcgtcatcagcgtttctccggttgccggattcggtgtgacaaatgttgatcctgaagcgctcggaacaaattttccgtcaatataaagtttcttcgtaccctgtaaaaatgtttccagcctttttgtgatctgcatcgttaaagaactcattcgtaacaaacctcccgaaattttttatggtctgttttgagcatcttgatgtccgcgcaaagtaagcgcatacagtcattctataataacacccccggtaaaatcaatcgataaccgttattgcaattcacaagaaaaaacggctacaataagcttatcgattaagaaaaggagttttataaatgattcataataattggcagacaaaagaaagcgtcaaaaaggtcaaatgcgtacatacagatgcgaaaaaatacattgtcaaaaatgtgctgacgccgggtaaagagtatgaagtcaaaaatgaaacagaagaattcatttttgttgcagacaatacaaacaaagtcggaggcttctacaaagagtattttgaagaagtttaaggctgaatgaattcattttgcctgagccatactaaaaaagactacatataaagggtggctgcaaaatgaaaaaaacagagcaagacaaacaaaataaaacatcagatcagcttcagcaagtgcaacctgaagaaggcaccgacacgacgatggaacaaatttcagatacctataaagaaggaacaattgaagatacggatcgttgatgttttgttgaaaccgcggcattggagaagccgcggttttttatggcgaaaataaaaaactgacttttcgaaaaaaataccgttttcttgaaaccttttcttccgctgaaccgtattacttcataactgcggcacctttcgcgaagggcttttttgatgaacgttctaaaaatgtaatctgttcgtaatggtttaaatgccgtctatgtcgtattcttatatagggataaagaacttattttttatgattgtaataaaacaatagtatagaagcagaaagtggggttcttcattgggaattttttctgtcagcagatcaaccgacacaaaaaagctggaggctttgctcgttgagggagaacggatcgaaacgatttataaactgcgggttgaccaaatatgctttacgaataaacgagtgattttctttgataataaaatgttctccaaaaagaaagtgcgcgtatttcttccatataaaacaattgaaagcttcgccattcaagaagcggggatgtttgatcccgataccgggcttgtattaatgacaaggggaaaaactttcgaattggaatttgcaaaagaaacggacttgactgaggttcaagccatcttaacaaaatacttatgcagttaaatatcacataaaagccatccgaatgcatgcggatggcctttttattatataatgcttgtttttccggagttcgaatcaatgagatccgggtcagcgatagaactgatggggatataaatcggcgccaaatcaccattttcttcaccgaatccgtagttgatcttattggataaaaaataatcgatttgctgatacgggccgatcgtaatggaagaaccgcggtcgaccgcatttactttaaagcctcctacatttaccaaaaccggcgaaaacatcataatgggcctccttttccggcagggattttgtcgcatgcagactcaaaggttgatggagaatcaatttgatcccggtcatccactttgccgttcgtgccgatgaagccgcttgcatctccgaagttctgtccgtatccctgattctttttatcagaattctgccattccgccagtaaattttgtccgacattcaccgctgaagcattttcaaaggaattaattttcaacatgaaaatattaatattgatatatggagttggttgaaccacaggcaaacctcctttaatacaggtgtatgccggctgttatgaccgtatgcttagacagggggcgataaaaatggatttcgataagatgaagcaatggatggaaatggcgcaaaacatgtccggcggcgacttttggaaaaacgtttttgatgatgaacaactgaaatcatttcaaaacggccattctcattttccctttcaacagggagatgggcaaatgagaagaaatgaggatgcttttcctcttatagatattgtggaaacccatgatgagctccaatttttgctgtatctgcccggctaccggaaacaagatgttcagctgttgtcctacggagaatatattgtcgtaaaaggcacgagaaaatcctttttcaatgaacaggattttaaacagaagaccggaaaatacggcgattttgaaaaaaaactcgatcttccgcattccgctcaaggtacgaagggaatgcaggcggtattcaaagacgggattttatatatatcgattgctaaacatctgggggatgcaagccagatcattatcgaaggctgatcttgttcgctgtgccatctatcagatctgaatcatcgatactcatgatagggatggcgacaacggtgcaatcaccgttttgttcaccgtacccttcatttcttttattggctgctgtgtttctcaccataacggaagagccggtgttaaaagccgctccgccgctgattccgttcatttttatatactcaaagttgataacggatggaaaaaacatcatgattcgcctcctttttgtatatcatgtttatatattcgcaatacgggacgcatagaactttccaagagtgacggggaaagaagtgattttctttgaaaaaaataatgaaagagattttcaaaaaagtgtgtgaagaagaattagaccggcttaagaaagtggaacaacagcttgatgagcttcaggataagtgtcattttgagccgcaaacggttgaaggggaaaaaacatatgtccatattgagcacgtcaaagtggacaagattgaatacaatattgattttgaacagctgagtatagaagagctgagcggtatgctgaatatcggcgccacttaccatacaccggcgcacaggctcaaacaagcctgcgctgaagaaagtcgggacaacccgcaaaatgatgctgcgaaagaaaaaagacagacaaagcagcagacacccaatgtcaccatcagggggagaaagcattgaccccattgtttcatcctcctttttcgagggtatgtattaacagatgcagcgaagaatacagacgaaaaaggagatgatgaatatggcattatcaaaagaacagcaggacagcctttatcataaattaatcgatttaaaggaaagtcttcagggagaatccaaagaaaatcattcaatgagcgaagacacaggagaactgtcgaacggagtagataatcacttagctgatcacggaagcatttatttggacagggtcacgaatcagacgctggacggtgtcgatcagaatcttttagatgaggtgaacgccgcgcttgaacgaatggataaaggaacatacgggatttgcgagaaaacgggaaaagaaattccttatgaaagacttgaagccgtaccgtacgccagaatgaccgtcgaagcgcagcgagaaacagaaggggatgtgaaaacagacgctccgtcatatgaaagggaatttcacgagcaggtgaaagacctctcaaataaagaaaccgttgatcaaaaaagctcacaaacttacgaaatcctggatcgcgagcaggattcacaataatagcagcaggtacattcatatgtacctgtttttttattccataaaaaatctcagaatcgaaataaaatcattgactttatataaaaagaaagtaacatactatttgtaagtaaatattaaaagattaccgggaggaatttagaatgtctcaagtattatttgtaaaatcaagcgaccgtacggctgaagaaggcgtatccgtaaaattatacgaagcgtttctggctgcttataaagaaaacaatccgaatgatgaagtgatcgaacttgatcttcataaagaaaaccttccttacctcggaagagatatgattaacggaacattcaaagcttctaaaggaattgaaatgacagacgaagagaaaaaacaagcgtcaactgctgacatttacttaaatcaatttgttaaagctgacaaagtcgtgtttgcattcccgctttggaacttcacagtgcctgctgtgcttcatacttatgttgattacctgtctcgcgcaggggttactttcacatacacgcctgaaggccctaaaggtctgatgggagataaaaaagtagcgctcttaaacgcacgcggcggcgtatattctgaaggaccgatggcatctcttgaaatgtcattaaacttcatgaaaaccgttcttggtttctggggtgtccaagatcttcacactgttgtcgttgaaggtcataatgctgcaccggataacgctcaagcgatcattgaaaaaggactgcaagaagcgaaagatctggctgcaaaattctaattgccataactcttgcgcccctacagggtgtgagagttttttctattatagaagaaactggcggcagctttcgattcaatcttatattgatatattgatattttgtcgaaaaaacaatttttatgtagaataaagcatttttcacaaagaaaaaaggttttctgtaaaagaattaaccctcttgccaaaatacgactgatggtgtaggatataagagaagctacattgttcgtattgttaattaagttttaacctttaagctgtaatagggagttttatatcgaagccggaatgtcatgcctccattgcagaggacgacaggaacgcttctgcaaacacccactttgaggagtggtggtttaaaactttcttacttgcgtacggcatacgtagcgaaagccatttcccttgcggagatggctttttattttgaattgcccttgagcagcgtactttatcagtatgataaaatgaaagaatcaaagacaaagtgaggttttacaacatatgctggataaagcccaatcccttctggcgcattattttggctacgacagtcttcgcgcgggccaaaagcaggcgatacaatcagttgcagaggagagaaaaaacacggtctgcattatgccgacggggggcggaaaatcaatctgctatcagattcccgcactgctgtttgaaggaaccacaatcgttatttcccctcttatttccttaatgaaagatcaagtcgacgcgcttgaagaagcgggtatcgcggcagcttatattaacagcacccagacaagccgtgacattcatgagcgcctgaccggtttgaaacaaggggcttaccggctcttttacatcacaccggagcgtttgacttcttctgaattcattcacatcctgcagaatattacggttcctcttgtcgcaattgacgaagctcactgtatatcgcaatggggacatgatttcaggccgagttaccggaatatcgaaatcctttttaatgaattaaaagaaccgcccgtcatcatcgccttaacggcgacggctacgcctgaggttcatgatgacatctgcaagcagcttcatattaagaaagaacaaactgtatataccggttttgccagagagaatttaacgtttaaagtagtaaagggcgaaaacaaagaccggtttatcgagcggtacctcgaaaaaaataaacacgaagccggcattatatatacagcgacaagaaaagaaaccgaccgtttatatgagaaattaaaacgcagcggcatcaatgccggccgttatcacggcggattggcggatgatgacagaaaagaccagcaggagcgttttcttaacgatcagatacaagtgatggtagctacgtccgctttcggaatgggaatcgataagagcaacatcaggtttgttttacacgcgcagattccgaaagatatggagagctattaccaggaagccggacgggccgggcgcgacggtcttaacagcgagtgtgtgctcttattttcgccgcaggatattatggtgcagcgttttttaatagaccaatcggccgccggagaagaaaaacaaaagcaggatctcaaaaaactgagacagatggtggattactgtcatacggaagattgcctgcagcggtttattctgaagtatttcggcgagaatgaggcggaagcttgcgaagcgtgcggcaattgcactgatacaaggaccgcccatgacgttacaaaagaagcgcagatggtattgtcatgcatcatcagaatgaatgagcgcttcggaaaaacgatggtggcgcaggtgcttagcgggtctaaaaataaaaaagtgctggaaaacggcttcagcagcctgtccacttacggcattatgaagcatcaatccgcagcggaaatcagtgattttatcgaatttcttatttcagatgaatatatcagaatggcggacggcacatttcccacgcttatggtcacccaaaaaggcagggacgttctgcttggaaaaagcgcagtcgcgagaaaagaagccttacaggccgccgccgtcaccgaaaatgatgaattatttgagcttctccggcgtctccgcaaagagattgcagctgaacagggtgtgcctccatttgtcgtgttctcagatcagacgttaaaagaaatgtcggcgaaacttccgaaaacagatcaggatcttctttccgtaaaaggggtcggggaacaaaaaagattgaaatacggagcggtttttttagaagaaatccgaaattatgtaagagaaacagagtgaaaaaaagtttttttagaaatttgcacattgtgtttttcatgggcgccggaaaaatcagaagcttgaaaacccttgctgtatcaaggtttcagcaagacttaccaagcgagagaaatgtttcatgtaaaggaactgtaatctaattcaaatcgttttgttattgaactgacattttcatatgttacgatatcacctgttagccgccaataaaaagctaacaagggaggatttacttatgaagaagacgattatgtcctttgtcgcagttgcagcaatttcaacaactgcatttggagctcacgcttctgctaaagaaatcacggtgcaaaagggtgacacgctctgggggatctcgcaaaaaaacggagtgaacctaaaggacttaaaagaatggaatcagttatcttctgatttaatcattgaaggagagaaactgactatttcttcagtagaaacaaccacatctgggcagtacacagtgaagcagggcgacagcctctggaaaattgctcagaaattcggaacatcagtcggcaatctgaaaagcttgaataacttgcaatcagatataatttacgcaggcacaacgttaaatgtgaaaggtcaggctcaggctcaggctgcacagccggctcaagaagccagccagccgcaaactgaacaaaaaccagctgctgagacagaacagccgaaacaagaagctgtcaaaaacgagcagcctaaacaagaacctgttcaagaacaacaacaacctaaacaagaagcgaaggctgtcgaagcaaaacagcagcctgttcaatcaaatacaaaccaacaagagcctaaaaagcagatgacaatgactgcaactgcttactctgctaacgacggcggcatttccggtgtaacggcaaccggtgttgacttaaacaaaaaccctgatgcaaaagtcatcgcggtagaccctagtgtcattccgcttggctctaaggtttatgttgaaggttacggagtggcaacagcagcagatacaggcggcgcaattaaaggaaataaaattgacgtatttgttgcaaagaaaagtgacgctaacaactggggcgtcagaacagtaaatgttaaagtattagactagtttcatatagagatgaagaacacaaggcgaaatgctttgtgttctttttttcttcccttttttgactgtatataatcgttatatgcggaaaaagaaaaagcgtttctctaatataataaggaatggatgtgaaaaaagaatcggaagggatgaatctgatggagccggaatgtatatgtttatggaataccttcacagaatcaccggtgtttcaagcaggtatatgcaccgctttcgccattgtgctcgttatcggactgtctatgcctgctgtcaggctgtttcaggcgcttgacagagggagaggaaggccagccgttattgaaaaggtgagacgtactggcgtgatgaagaatggcaggcacgagcttgtacttattttaaacgtaaaaaaccaagacggaacgcatgataaacgtgaactgacacacgccgtatataatgaagagatcagccgtttttatgaaggagcttccgtatgggtgagggcagcggctggcggacgaattatgatcgctcctcgcacgccgcggcataaggcgtcaaaataaaaagacggggcggttttcccgtctttatgtattaatgccgatcgatccatatccgtccgccttctgagccggcttctatcctgcatgctcctccgatcgggaatgtcatcaaaggggaggtatggccgaaatcagcatttgcgataacaggcatggatgacagttcttcttttgtacggatgacggcacgcagagcctcctcagacacatttgaagcatgctggaaacgtccgatgacaattcccttcacggctgaaaaagcgggaagatggatgagtgactgcaaatcccggtcaaacatatgaatgtccgacatatgatcatcttctataaacagaatcacttgttccatctccggaaagtattcggtgccctgcagaagattcagcgtgcatagatttcctccgatcagtgttccttccgcatatccgggctgaataacgagcggtcccggattccgataaaaacgtctgtcctcctggttcaaataccatttatcatcactccactcggatgaaggttttacctcatacgggttgtcagaagcacagcaggccaagaaagagtcaatcgtatagtccagcccttttttcatggcaaatgaagaaaaatggggaccggaatatgtaataaggccggttttttgatatatggcatggccgagagcggtaatatctgaatagccgcaaaggattttcggatgccgcttgatgttttcataatcaacgtagcggagcagctgatttgattggaacccgccgagtgtcgtcaaaatcgctttgatgtcaggatcagcgaaagcttcgtgcagatcccgtacacgcgattcaatcgatgatgaatgaaattcatttatttctttcgcattctctgaaaaagagacacaaaagcccagctcctccaattttgtcttcgcggcatttatattttcatctgacatagcggacatgcttgtggccggagacacaatacggatgccgtcgccttttttcaatttttccggatacaaaaaaaaccctccttaaatggtttaatctattacaccatattaacgagggtttatctatcattttttacaggtcgacccatttaatgccgcctgattgcgtatcattgtcaatccagacatcaaattgatgcttttcataaaaatgaacgagccggtcgacatgatcccaatcacgcttagcgatgtcgcccgtcactttcgggatattctgctctctggcgatatgttttaaaaatttcatgcagatcgagccgtagccgtggttcggcgggcctttaatatccccgatatgaatggcattgtcataataagaagcgatcagtgaaaaacagcctcttccccggtaggctgattcacaatcagtcagcataatcttacatgtttggccatcatcaatcgaggaaacaatgatccaatcgtcattgttcgattgatcaataccaagcactcgcgcgtcttttgatacatctatcagattttcccgcattctgaaaatctgaaattcaagtttatgaagctctttttccagctctttctgatctctttcttctgcagtaaacaaaatcatactcctttcacagcgtaaaagtcttagtcaaacacaagtatccattgtagtaaatgatgtcttggtttgtaaatgggttttgcaaaaacttttttagaaaagtctgccgtttatatgtggattgacgtttttaaggcggtggggatagggaaaggaacagtgagcagcggaaaaaggaggaatctataatggcaattgactcactcatcggcaaattgaagtacgtaatgacggaatctcctgataaaatgctttccttatatgtaaatacggatatgagaaatccggatcagcaggggggagagtggaaaatcgccttgaaaaccggttttcggagattaaaagagtatctgtctgtaagtgatccggaagaagaaaaatctctcgtccgcatcatgcaacgtgtctatcaatatatcgatgggcttggtaaagagatgccgcgaagcctcgtattttttgcatcgggggaaggcggtgtctgggagacgattgaattgcaggtgcctgtcgaaacacgattttattgggaagaaacggctgtccttgatcaattagaacttctccgtgaacaatttccaagcacggcttttattctcacccagcagaatgaagtgaagatcatagaaaccgtactcggaaaaattgaaggggtggagcattatcaatacgacgtcatcaatgaatcgtggaaaccgcaggatgtaagcggaagctccgcatcaatggacgaagacgccgccaaagcccatgtcgaagaaaaccaaaacaggctgtataaacgattggcttcaaaccttgatcaaaaggccgcttcacaccaatgggagcgtctcgtaatcgcaggggacaaagaaacagccgatattctcgatcagcatatgaataaaccgatagatcggatcattccaaaaaatctgttgaatgaaaacgaacataaagtgatagaagaactgttgaaggaagcataatatgacgaaaggccgggtctcaaacacccggtctttttagggcttaagtttgtctaatttctgacgaagcggacgaaaccgttgacatcaaagctgaattctcataccatttggatagtcagtaaaattgagagaggtcataagatgaatcagacagaaaacaaacctaaaagttataccggtatcgtgctgacattgaccgttttgatcaacgggttaattgcggtgctgttttttatgccgaaatcgggacaggtcagcattgccaatattcatattctgccgatgttaaatgctatttttaacagctttacttttatctttttgctggcagcgctctttatgattaagcaaaaaaatattcaagcgcataaacgctttattttggcggcgtttacgacgactctgctgtttttgatctgctatgtcgtgtaccactcgatagctgagaatactttattcggcggccacggcatcattcgggggatttatttctttattttgattacgcacatctgtctttccgccgttatcgtgccgcttgcgctgtttacgctgatcagaggattcagcatgcaggtggagcgccacaaaaaaatcgcgagatggacgatgccgctctggctgtatgtcagtctgacgggtgtcattgtatacttaatgatctcaccgtattattaaaaaaagccgtgctctgcgcggcttttttctattgatggaaaaaggcgcctcatcagggcgccttttactcttcaagcgtttcaagtgttgttacatttaaggattgttcaacggtttttgtttttgcttttactttttctgcgtacgtgtaatcaccatagcagtagggataacggaaattgtctttgttccctccgcaagtgtaaagtttcggattctttttgacctgctgctcggagtattgttttgccagttcctcagtatgcgatcctccatgttcagccacaaaatcaatatagccggctcccatgttgtagctttgtataatcgtatccaagtctacgccttttttcttgcctgtttggtacatgagagtgaattgtttgattccctgtttgatactggtttgagggtttttaatctcatttcgctttaaacccagagattctgaagactgcatgggatcatttcctcttccttttgactcctgatatatcatgccgagtacaagcgatgtatatttggtgagtcctttttcatccagctcgtcttcaacaagcggtttgtaatctgtcagccgttcaagcacgatcggtttgacatcaaacggaagacttttgagccattcattatttgaaaataacagaatgaggaagaaggaaaccatgacaaaaacacatatcatcataagacccgcggcagcgaaacagccttttttctttttctccactgtgtttcaccctcaatttcaggagcattatgactttttcattatgacacagatggatgcgcgaaaccaagcggaaacccgtatttgaaacataaatttaaaataacggttcttttgtcaggcgcaggatgtatctgcatcaattgacatttggtataattgggctacttgagaaaagaagggtgaggtatatgactgaatttcacgaatccggaaagacgaatgaccccgctgtcgatttagatgaggaaactttatttttggttgcccagacttttaaggcgctgtctgatccgaccagaatcagaattctccatttgctgtcacagggtgaacacgcggtaaatgatatcgcagaaaagctgaatttgctgcagtctaccgtttctcatcagctgcgttttcttaaaaatctacgcctcgtcaaatcacgcagagaaggaacatccatctattattctcctgaggatgaacatgtgttagatgtgcttcagcaaatgattcaccatacgcggcacgattaaaaaacatccctgctttttagacagggatgtcagccgtactgactgttattggtttggtctctgctcgtttttaaaacataaaaagagaagccgctgtaataaactgcgatgaaataaaagatactgatggtcagcggatcggccccgaccgtttggctgtatgcctccggatgggtaaagtccgctgtgacccggtaaatttcaataacgcgataaacaaatctcgataggaaaaacgttaatagaataagttcaatccacagatgagtgcgaaaatacatttttccgcggcgttcttcaaaagaaatattccgtttggcaaacaggaccagaagccagccgcaaaaagtgccgaatataagatggccgtataaagccgggtgtgtgatgctgaaaaacgccagagctgcggccagcaatgaaaacaaaatcattcttgtataaagccagcggggtttcaaaggctgaaagccgacggaccgtttcacctttttatacagaaaaaaggcaatcattaagacagggcagatgctttgaagtgtgatatgcatggtgtgaaactccccctccgttgagtagtgtatgcttatccggctggttttagtagtctgatttattcgcaggctgaaagcatcttttatcacagtatgcgcgtttcttttttttgcataagagaagcgcccgcgcctttttcaggatttaaacagaaaactcttgataaactaacggtattagttataataaaactaacgatattagttttagggggatgttgatgagaatcttacaatacggaagggtttggcagctgactttttttccagcgcttttcccggtgaattgttatttggtcgaagaagaagtaggagtaaccctgattgacgccggactgcctaacagtcataaaggaatcaaacaagcattgcggcagcttgggaagccgctgaatgacatattactcacccacgcgcacggggatcacatcggttcgcttgactcattagctgcggaatttccggatgcctccgtctgtatttctgagcgggattctttcttgctgaaaggtgacacttcattatttgagcatgaagcacaaacgccgataaaggggggagtgccgaaaaatgttcagaccgaacctgatcgcctgctgaaaggcggcgagcggatcggatctttacttgtcattcccgctcccggtcatacgccgggaagcctcgcttttaaagatatgagaaatgatatgctgatcgtcggagatgcctttcaagtacggggcggccttgctgtttcagggaagctgaaatggaaatttccgtttccggcttttgctacgtggaataaagaagaagctgtaaaaacagcaagaacgcttatcgctcatcaaccaagcagtctggccgccggacatggaaatgttctctgcaatcccgttgaaatgatggctgaggctgctgaggaagctgaacgaagcctgccgggaggccgatcataatgtcaccgagagtcggaatgagccttgacatgatattgagagccgcagcaggcatcgctgacaaaaaagggctgaacgaagtgacgcttgcggccgttgcaaagtccttaaacgtaaaaccgccttccctttacaattttgtcaatggccttcaaggaattaaaacagagctggctgtctccggtttaactatgttatttgaaaaaatggcggcctctgcagaaggactgacgggtgaaacggctttgctcgctcttgccgatgcctatatcaatttcgccgaagccaatcccggattatatgacgcaacatttcaaaagataaaagacggccggattgagaatctgtcaagcctgcttgtagagcttgttgtcaggcagctgacagctaacggttatgcacagtctgacactgcgattcatgctgcgagaggactgaggagccttcttcacggctttgccgtgttgagaaaacagagtgcatttgaattaaccgaatcaattaaggaaagccggaagtttgcagttgttgctttcctaagaggtttacagggtaggtaacaataatattattatgtaaactaaataaaaaaacgcatcagtaaaaggagggacaaatggattcattacaacatatcatttgtgagcggcgcacctattcacatatttttgattctcatgcacacacatactgccaaatgctctttccgctcgaaggacagctggacttggagacagaaagacgtgaaatcagattaaaacctgatcaaatgctgtatattccgcccgggcatgaacatcggttccgttctttggagcgaaacgaatgtctcgttctcgacataccggcatattttttcaaaggttcatttgatcccggcgttctgaataagcttgattctttttggacatcgattcggtttctgctgacagaagagactaagcagcagtcggctcattcattgagtctgcttgcagaatatattgctgaaaagatacaagaaaaccgtacgaatgattcaattgcgtatatccgccgaaatctctcaaagactttttcaattaaagagcttgccgcaatggaacattaccacccggcgtattattccgactggtttaaaaagcagacagggaaaagcccgcaagcttatattgctgagctccgtatgaagaaagcggaacaaatgcttattgaaacaaaatgccggctgacagacatcagtcaggaggtcggctttcaaaatttgtcttcctttaccagatggtttgtcagacataagggaataacgccgcgcgtcttccgaaacacctttcaatctgataaataatcctgaaaatcagttaaataaactgcgtctttttttggtatcatgattgtaaaaaaggagtttttgatatggcagtcatcgaagattttatcaagctcgatctcagaataggaacggtcgtaaaagcggaagtattcccggaagcaaaggtgccggccattaagatgacaatagatttcggcgaagagatcggcatgaaacaatcaagcgcccagattacaaaacggtacgaaccgggtgatctgacaggcaggcaggttaccgctattgtcaactttccgccgcggcggatcgccggatttaagtcagaagttctcgttcttggcggcatcccggaaaaaggagatgttgtcctgcttacgccagagcagtcagtaccgaacggaacgaaaatcggataataaaaaaagacgtttgcagaagcaaacgtcttttgcgtattgaggcgatacaccacacgccacattcgtgtgtgccgcaagggcatgtgcatcggcttacacaattcagctcatcgctatatgaatatagcatggccggtgtggaaatgcaagagattttttaatatatgttatatctggctttgttttgccgatccccgattccttcgtgtaaggttcgtttgaaattttatgatcttgaataaagcagttcgacaaatgcaagagggaatttgagcaagttgtgaccgaagtgtgacctggaattaaaatccgggtctttttgtgtaaaagatgcatgcgaagagaccatataggcattaaatgttattactgatgtcttcatttatcttttggctaagtttctgaaccttctctttaacatttgaaacagctcttttttgaatttcatcaaagttctcctgaatatagtccatgacacttcttattataacttcactttcaaaattgaatatctcatttatttctgactgttcttcatctgttaggtgatggtattgaagttgtttagcatttacttcagcagctgcatcaatcctaacttagttgttctggctgtacaatttcatattcaccttctgcatacttttgctccgcataatggtctccccattgacagagctcctgcaagataggtttaagagattctccaagttcagtggatgaatattcaaccttcggcggtacttggttatacatctttctgctcacaagtccactggcttcaagctctctaagtgtttgaatcagcattttctgagttatatttgggataatgcgctttaattcactcgttctcttcggtccattcattaaaaagtataatacaaggcctttccattttccgccaatcacttcctttgtcacttcaaacccacagctaaattttttcatgtctaaagctctccattccacatttattactttttagttactatatcacaaaaaagtgggtacttccgataatgtgcttactgaaggatactattacttgtaagttgttcttcaagtacttaaaggtactagacataaaataatattaattctaaaggagtgttaagtatgggtgaatttgaaggtaaagtagcgcttgtaacgggtggaacaagtgggattggtcttgctgcagcacaaaaatttgtaaacgaaggtgcatatgtttatatcacgggacgtagacaaaacgaacttgataaagctgttaaccaaattggcaagaacgtaaccggtgttcaaggtgatatttctaagcttgaagacttagacaaactatatgacatgataaagcaggaaaaaggtaagttggacatcctttttgctaatgcaggcatcggcagctttcttccattaggtgaaattactgaagagcaggttgatagaacgttcggcattaacgtgaaaggaaccatttttactgttcaaaaagcgttatcactattcccggacaaagtaggttctattattgtaacgggctccaccgctggatcaattggcaacccagcatttagtgtatatggagcatctaaagcagcattaagagcactggttcgcaactggattcttgacctaaaaggtactgaaatccgtgtaaatgtggtaagtccaggagtgattcttacacctgcatacgatgagctttttggtgatgcacttgaaggagcgatggaaaatgccagaaatactgttccagctggaaaagttgggacacctgaagaagtagctaacgctgtatctttccttgcttcagacgaaagcagttacttgacgggtattgaattgttcgtagatggcgggctagcacaggtataatttcactgcgcagaggttacaaatcttccccaaaaaaggttaatggggatttacttgaagaagccgtataaaaaagtcgttttccttaaaggacagggaattcgacttttttatgtttgaatttgattaacgttgtaaattcgcattttcctggggctgccactaaatgacctgtaaaaaagattactttgtgaataaatgtacttaaagtaacggaaaggagaatgtccagttgttatttggagtgaattcggtggctataaagaacttaattctgcccattttataaagttcttttatgaaagacttcatgaaatgaaagaaaatcgggaagaagatgaagactaagacgattaataaaagaaagctctcttttagagagcttttttcagattttcaatttttaacaggctttataatgagcaaacaggcattactcaaaatactcgccgcgcctatccaaagcagccattgtgttgcggtcagccatgaggcagttaggataaagagtccaatggcaattgatatataattgccggctcggtccagtttacgattgcaatgaagtttatatttagcatgagaaataaattgatcaattttatctttcagctcatagcatttttccttcatcttatcctcagtttcttttacttttcgataaagcatattattcatcgtttgcactcccatatcgccgttttgaaaattcagccatgattttttcttcatagtcatctgagatggattgtgcctggtcttcaactttcaaatgtgctttttcttcaaaaccgtcctgttcttcaccatcaaaacgataaagtttttgcaatagcctccagaatgtttcaacttcttcagttgtgaactcatgaaacatatccgctaaaaaataggtggatctttctgaacaggaaattaacgctttttttccttcaggggtaatctcaatattgattgcacgtttatccagtttgcttggcacagtgtgaacatatccttttttcgagagacttgaaattaatttgttagcggtttgttttgttgtgcccagctttttagcgatattcataagtgtggtatcttccgtcggtaaatgggcaatagcaataagagtcatgtgctgtcgggaagtcaacatttctaagtattcgtccccccgagtctgcaccttattgacaaccgaaaataatgatgcgtaactttgttgcataaaatgcagttccttcattagtaatttaatatccataagttatctcccatctaaattgtcaccatgttgacaattacaatatacatcacgaagggaaataagtcaacatggtgactaatagggcgggtacggctgttttcaaaaatgccacagacagtcggagtgtttacaaaaggggaaataagtataataaatgcgaaaagggcattaatccaaagtgggaaggtgtttgacattcagaaagtgaactggtcagaacggtatgaatggttcaataaacaagatgaaaaagatgggcgtttaatggcgttccttcgtcatgagcttacatatgaggaagtcatacggttatataagaaagggttttatttgaaatcaaaagaaggggatgtttcgttacgtaagaacgatatctgtcgtatgtttggggttgaagagaggcagtggggcaaatcttaatgaacgggaagagaaaaactcttcccgcttttcatagcagctgttattctttttccagcatggaagtcagccattctcttaatgccggtttctgcacataccgctttccgtttctcgtgatatgcggaatgtcagatattcatgaggatcaggtgagttaaagttttcaatccgtctccgatgaaatatccggctaaagcgattccaatgccggtaatatatccaaacctccaataaacgttatcattttttatacggtgaagccggccggaggattcagccttcagcaaaaccgccgggcgtttattgcggacggttttgattgctgagcttttccacctgcacctttccggagaagaaaacagcacctccgcccatatccgccagccgatcgggcgtgagtgaattgacgagctgttttttatcatccatatcggcccaaagaccttggctcaccgcaacgccgggaagcacctgttcgccgaccgaaacagtcaattcgcactctccgcggtgattccaaactctaacggtttctccgtcttctatgttccggtgtacagcctcttctgtatgaataaaaagttttggcgctttttccagttttacgtgtttttcgttatttgaaaatgtcgaatttaaaaaattatgattcggtcccgggacaaataaaagcggaaaatcgtcatcgctctcaagagggatgtgtgtcggcagcgccggataaccgtcctgtttcatcttttccgaatataattcaattcttccgctcggtgtcttgagctttcccggaaaaagcggttttttccgtttggctttcatgaaggaatggcttgagagcgcttcgtaatcaatatcctcgatatacggattgtcgggaaagtccagcgcctgtctgattaattcttcatcagaatcctgaagctcctgctcggtaaatcccattgctccggcaagcagacggaacacttccgtattcgatttgctgtctccgtagggttcgatcaccggtttttgcagctgaataaaatgatgccagtaagacgtgtaaaaatccgtgttttcaaaagcggatgaagcagggagcacgatatccgcatatttggcggtttccgttaaaaacagatcgtgaacgactgtaaataaatcctcccgcagcaggccttttctgactttattcgcttccggcgcaaccactgcgggattcgtaccgtaaataaacagggagcgcacgggcggttttgtttctaaaagaacgcttccgagcctgttcatattaaatgatcgcggcttccggccgtaaagcagatcaggccgctggagcgcttgtctgttatagtttaataccgcgctgttgtgcttgattgcgcctcctccggtgttgagccactgtcctgtaacagccggaaggcaggcgacggtgcggacgatcattccgccattgtcatggtgctgaatgccgtttccgatcctgataagggaaggggaggtttccccgtacattctcgcaaggcgtctgatatcgtcggctttaacgcctgtaatagcagaaaccgtttccggatcatagtgtttgacatgcgcttttaattcgtcactgccttcggtgtattctgtgagaaatgcttcatcgtgaaggttctcagcgaataagacatgcatgataccgagggcgagtgcggcatctgtgccgggacgaatgggaataaaccaatcagcaagccggccggtttggttcttatgtacatcaataacgacaatcttagccccttttttccgggctttttgagcaatcatgacttggtgcatattcgtgctgacggcattgattccccaaaaaataaagagcttagcatgtatggtctcctccggatcagtacccgctccttctcccattgtatagttatagccttcagaaccggctttgctgcagatcgtccgttcgagatgactcgctccgagacgatggaaaaaacggcggtccattccctctgccgccagttttcccatattgccgtaaaagctgtacggaagaatgctttccgctccttcttcggcaataagctctttccagcgcgaactgatcgtattgattgcttcctcccaggaaataggcgcaaacgcggcttcaccttttttaccgatcctttttaacggaacggttacgcgcttctcatcataaatacgctcagccatgtgtctgactttgttgcaaatattccctgatgtgaccgggtgatcggggtctccctgaatgttaacgatttttccgtctttttttgtcacaagcaagccgcattgatcgggacagtctagtgagcacaccgacttaaagaccccgttcggctgtgttgcagcagaattcatagcccatttctcctctttgtttatattgtaagcattataacatttcaaaatcgaacgtcaattcagaaaaaagtgttgacattacggaaagacttttctatgatgagtttattcttttaaacagcctgacaatttcatcattttattttctatccagagaggtggagggactggccctatgaatcctcggcaacatttattgtgccaattccagcaagcgtatgcttgaaagataggaaagaatggtctatacatatttgtgcgcttcaagcgtataaagacggtatatgaatctctttccttctttgaggaaagagatttttttatgaaaaaatttatgtgaaaaggatgttttgcaccatgacggttttaattaccgcgccatatcacgacgaggggctgaaggagctggctgagctgttcggccggactgtgcaccggccgtggaagaagcacggccgggcctatcgggaagatgaattgatccggatgattcaagagacaaacgcgtcggggcttataaccgaacttgatgaggtgtctcagcgtgttattgacatattgccggattccgcttttatcggtgtctgcagaggaatgccgtctaatgtggatattgcggcggcgactaaaagaaaaatccccgttttctttacaccggcccgcaatgcccaggccgttgctgaaatgtttatcgggaatgtgatttcatttttgcgtcatacgtattcttcccatcagtggctgaaggacggaaagtggaatggtgattatttgcaggcttacgtcaaattcagaggaaatgagctgacggggaaaacagtcggccttatcggtttcggagctgtcggacagagaatcgccaggctattggccgcttttgactgcaaggtgctttactatgatccatttgtccgtcatgaaaaccgggagtatgaaaaaacgacgattgaacgggtattttctgaaagtgatattgtttccgttcacttgccgcgcacagaagaaaccatcggccttatcggcgcccggcactttcaattgatgaaacaggaagctgtttttgtcaatacgtcaagagcggcggttacagacagggaagagctgctgcgggtgctgaaagaacggcggattaagggagcgatccttgacgtgttttatcacgaaccgcctgaatcttctgattatgatttgatctctttgccgaatgtgttcgcgactccccatttagcgggcgcaacatttgaagtggaagatcatcatgtgaagattttaaatgaagcgcttttcaaatggaaacaagatcaaacctattcaatacgtgaactttataacaaaagagaacttgaaacggaaggaggaggctgtaatggctgaacaaaaaggctaccttgtatttgacatcgggactgggaatgcgcgagtcgcggtcgtgactgccggcggcgaagtgaccgcgcttgaaagggaagacattgaatatgtgacggatccgctttatccggacggacgatatttctcaccggaagggttatggacgcaaatcagcgctatggcaagaaaggctattgccaagagccctcatattacattaatcggaatcacctcaacaagccagaggcagggaatcgttttgatcaataaagataaaaaggcatttctcggtctgcccaacattgataacagagggcgtgaatgggaaggcggaattgaggcagaagaagtgcatcagcaaaccggacgtcttccgagcgctttattttccgccatgaaacttgtcggattaaaagccagacagccgtctttatggaaagaagtgaagtgcatcacaagcatcagtgactgggtgacatttgagctgagcggaattttaagctatgaaccgtcacaggctgctgaaacactgctgtttgacgtaaggaaaaaggcgtggtcagagaaattatgcaacatcttcggtgtgccttctgccattcttccttcactcgtccgatctgggacggttgtcggaatgttaacgtttaagaaagcggcggtgctcggtctttctgaaagagtgcctgtgattgcaggcgggggagacacacagcttgccatcaaaagtgcagatgcaaagccgggagatatcgtcattgtatccggcacgacgacgccgattacaaagataacagcggagaccggaaccgaaagtttagagaatgcatggctgaattgccatacagaagaaggtgaatggcttcttgaaacgaatccgggtgtaacaggactcaattatcaaaaattaaaatccattttttatccgaatgaatcctacagcgtcatggaacgggaaatcgcaagtctgccgaaacatgatcatgcctgtatatctgcgttaggctcctatttatctcctgagaaaaacgcactggcaaaaggcggatttatttttgacgctccgctgtcccaaaacttaagcagagcccattttgtcaaagctgcactgctggaaatcgctttttcaatcaaatggaactatgaggcgttaacagaggcggcttccttttcacaagattatgtgaaggtgtgcggcggcggtttccaaagtgatgctttgacgcagtttcttgctaaccttcttcaaaagaaaatctataagagagaggggttcagccaggcatccgcaatgggagcggtgatgatttgcaacgaagctctcggtgtgaaagcagagctttcgacctgcacaaaggtaattgagccggaagcggatcagacggatctcttcctatatgaagaatggaaacatacccaaaaattatttactcattttcagccggcggtgaaagcctgacttggggatgagatgacaacatgaaagattgctgaggaggaacaaaaatgcttaataaaataggaattccgaaacagctcgcctggggatttttaggggtcgtgctgtttatgatgggggacggccttgaacaaggctggctcagcccgtttttagtcgaaaacggcttgacggtacagcaatcagcatccttgtttacggtttacggtatttctcttgctgtggcgtcgtggttttcaggagtctgcctcgaagccttcggcgcaaagcggacgatgtttatggggctgttgttttacgtcatcggaacagccgcgtttatcgcatacggatttgagaatcttaatttgccggtgatgtatgtcacgtattttattaaagggctgggttacccgctgtttgcctattcatttttgacatgggtgatttaccggtcgccgaaaaacaggctcagtacggcggtcggctggttctggattgcatattgctgcgggatgtttgtattcggtgcttggtattcaagctgggccatcaaatccttcggctatttgaatacgctgtggagttcaattttctgggtatgtctcggcgcgttttttgctttgattttaaatagggaccgctttgaaaagaaaaaggcagataagcgggaaaaggcgcaggaattaatgaagggaatcaccatccttgctgaaaatccgcgcgtgctctctgggggatcattcgaatcattaacagcatcggaacatacggatttccggtattcctcccgatgcatatggcgcagcacggcatttctacaaatgtatggctgcaaatttggggaacgatttttctcggaaatatcgtctttaacttaatcttcggcgcagtcggcgatgccttcggctggaaaaagactgtcatgtggttcggaggagtgggctgcggcatttttactcttttattatattatgctcctgttgtatcacatgggaatttgctgttcgtcagcattgtcggttttatatggggagggctcctcgccgggttcgttccgatcggggctatcgtgccgacggcggccggcagcaataaaggtgctgctatgtctgtgttaaatctggctgcgggcctgtcggcatttgtcggccccgcgcttgcctgggcgttcatcgggcttgtcggcgcacaaggcgttgtatggattttcgcagcgctctatttcgtaagtgcgatcttgacaaatcaaatcaaaatacctgaagagaaaacggcaaaacacaataaagcattgcctgaatacgcttcttaacagcagcgccccgaaaattcggggcgtttttttacggctgatgaagaaacccggcaaaccgctgaatttgttcacgtaacgattgtttgttttcgtgaaattgtttgaaacgatgtccgtttgctccggacggatgcgggaagccttccagaatgaccgcatggcccattctgcggttcttcttcagcgtgcggcaggctgattctgctgcttttccgagagggataagcagaatgtcttttttcatcatttctatttcatccggaaaacatgtcagcgcgtaacggctgagaagagctgatctgctgatggccggccggtgtcccgtatagtttttctgtttataaaaaacagggtgtttgataacggatgtcgtatgaagcagctccctttttgaatcaaaaaaccgggatgaatcctcaacgtgaagcgcggccggcagaccgcattcattaagcatttcgatgatgtgctgcctcatggaaccggaaagtccggccgctttttttgtctcatatgctatcacctcaagagattcgccgttttttaaaagctgtgccgctgctttgtacgcccgctgcatctgaaaaaaaccgggtgtaattccggagatgacaaccgcagcatgtgggttgatatactcattatgaggcgaataatacatatccagatctccgtccttggctaaatggaactccgaagtcagcaaatccgattttgtaaatcctcccgaagatgataatgctttaagctgctgcaaaaaatgcgcaagccgctcacgatcgcaaatcatgttatgcctccttgaatccgccagtttctcttagtgtcatcaaaaacgtcggatgacatgcaggctcataaaccgcttttaccggcgttccagagcattttcaggacgtgaggcgttcctttaacttcggctgccgtcgtttgcacggctgtttttttagtaagaaagtcttcctgcagttctttctgcttttgtgataacaaacgggtttctgttttgatttcttcaacggacgtctgcatggacgctgtcacggcgttaatcttctttatatcaggcgctgtgtttcttttaaaatgcacggcggatacggctgcataaattaaagcggcagccgcaacggcagcactgatatacaaaatgatgatcatctgcttttcactcctttttttcagttgataccctttacggatcgtgctgaatcattttatttgctaattgttttttttctgcttataatgtgaaatcgtacataaggacattcagaaagggtgaaagacatggaaagcttacaaaacaaaacggctcttatcacgggtgcgggcagaggaatcggccgcgccgccgctatcgctttagccaaagaaggagtcaatatcggtttaatcggccgtacagaagcaaatgtcgaaaaggttgcggaagaagtgaaagcccttggtgtaaaggcatcattcgctgctgccgatgtaaaaaaccaaaaagaggttgaacaagccgtctcttctattaaagaagaactcggtgaggttgacatcctgattaacaatgccggaatcagcaaattcggcggatttttggatcttacgcctcaagagtgggaagacatcattcaagttaatgtaatgggtgtataccacgtgacacgcgccgttcttcctgaaatgattgagagaaaatcaggagatatcattaatatttcttctacggcgggccaaagaggcgccgcggcgacaagtgcgtacagcgcttctaaatttgccgttctcggtctgaccgaatctctcatgcaggaagtcagaaaacacaatatccgtgtcagcgcaatgactccgagcacggttgcaagcgacatgtctattgaattaaatctgacagacggcaatccggaaaaagtcatgcagcctgaggatcttgcagaatatatggttgctcaattgaaattacacccgcgcattttcatcaaaactgccggtttgtggtcaactaatccttaatcaaaaggggacctgtctttgtgacgggtcttttttgttttcgcaacccgattaaataggcataaagatccgtttttgcagaaaaaagagtgaaaaagaaaccgatatcagctataattaaactaaataaactatgtaccaaatgttcaataagattatttttccccgcatccaaaaaacaaatcaatataaaccaaactgtccgaacaataaaagggaaaacgggatataaagagaatatttagtacatggaataatttgttagaaggaagggtgggcacatattgaaagaagaaaaaagaagttcaaccggttttttagtaaaacaaagagcctttttaaagctttacatgattacaatgacagagcaggaacggctttacggactgaagcttctcgaggtgctgcgttcggaatttaaacccatcggttttaagccgaatcataccgaggtgtaccgttcacttcacgaacttttggatgacgggattttaaagcaagtaaaagtgaaaaaagagggagccaaactccaggaagtcgttctctatcaatttaaagactatgaagctgcaaagctttacaaaaaacagctgaagacagagcttgaccgctgcaaaaagctgatagaaaaagccatttcagataatttttaaatccggccggaacgctcccggcctcccgggctcaaaaggtttgttctgtgattcattatacataataacaggctcggaacaatacatatcaataaaacctccaaacttgacatcgactcctgaagtggtaacataaaaaacgtgtgaaaaatacgaacaaaatacgaacaagggagatgttaccgatcttagatcaaaagaaagttgcttttatcggagcaggatcaatggctgaaggaatgatatcaggcatggtccgcgcaaaaaaaattcccaaccaaaacatctgcgtgacaaaccgccgcaatacagagcgactcgctgaattggaacatcaatacggaattcaaggcattgcttttgacagcatgaaaaccgaagacattgatgtctttattttagccatgaaaccgaaggatgctgaaatcgctcttgctacgctgaaacggcgtattcaacctcatcaaatcatcctgtctgttctggcaggcataacaacctcatttatacaacaatcattacatgaccgtcagccagttgtaagagtgatgccgaacacatccagcatgatcggcgaatcggcaacagctgcggctttcggagaccatgtctcttacggttcagcaaaaaccgcggtatctcttttggaatgcctcggggaagtgtacgtgatcaaggaagatcagatggacattttcaccggcatcgcaggcagcggaccggcgtacttttattatttaatggagtttattgaaaaagcaggtgaagaagccggcttagacaaacggctgtcccgcaaaatcggggcgcaaacgttattgggcgctgcaaaaatgctgatggaaacgggtgaaaaaccggatgtgcttcgggaaaacatcacctctccaaacggcacgacggaagccggcctcgatgcgctcaggtcagaaggcggcggagaagccattgccaaagccattaaacacgcgaccgaacgttctattgagatcagcaaaacaattgaaaaaacggcagcactataatcgttaaaaaacaggagtgatacagtgacgtctcggacgaagatcaaaagagtcgcggtgaaaatcggaagcagctcactgacgagcctgcacggggaaatcagcagaagaaagctggaagcattggtggatcaaatcgcacagctgaaggacagcggctatgaagtgattttaatatcttccggcgcagtggcggcaggttatcggaagctcggatttattcagaaaccggaaggcctccctgaaaaacaggcttctgcttccatcgggcagggattattaatggaggcttactcaaagctgtttttagcgcacggttatgtcgcatcacaaatattaattacaagaagcgatttttccgatgaataccgctaccataatgtgcgcaatacgatgaacgtccttttggaacggggcattattccgattattaatgaaaatgacacggtcacagtcaaccggctgaaattcggagataacgatacacttgcagcgaaggtggcaggtttaattgatgccgacatgcttgtaattttatcagacattgacggtttatatgatgataatccgcgcagcaacccgaaagcgaaaagaatcagacatgtaagtgacatcactccggaaatagaagcaagcgcgggagatgccgggagtgaaatgggaaccggcggaatgcgttcgaaactggatgcttttaagattgtgatggcctccggtattaaaggctttctcgggcaggctaacattccggacattctgcttcaagcggtagatgaggcggctgaaggaacttattttgaagcggaaggaaccctgccgttaaaccacaaagaacaatggcttgcatttaattccggccccgaaggcgaaattgtgatggaaaagaaaagcagccgcgatgtcgcaaacggaaatatggcgctgtcaccgcaggatatcgaacagattaagggcagattcagcagcggagcggttgtcaggctgcttgatcagcagggagaagagctcggactcggcatcgtcaactattcctcagcccagctgaagacatttaaagaaacgcctcacaaacagaccgatcaatcagtcattgatccggaagcgtttgtctgccacgttgaactatccattccgatcggctgagaaagatctataaaaatatgaaaaagcccgaggcttcgttttgaagctcgggtttgttttttattgatattgttcaagtttggagaaaaattgaatgacaaaatgatagaaatcatttgcagacggagccagttctcttccttttggtttaataatgcctacggtccgcttcacttgaggaaattcaatcggaattttgaccgtgaaccggggtgtggtttctgcaaaggtgctttcaggcaataaagtaactcccatccccgcggagactaatcctttaatggcatctaaatcctcgccttccgtcgatacaagcggcgcaaagccggcctgtctgcaagcgtcaatcgccatgtttcggagaataaacccttcaggaaataaaacgaattggtccccgcgcagatcaattaaatgaatatttttctgtttggcaagcggatgatgcagcggaacaagcgcgtaaatcttttccgtgaataagatattgcctgttatgtcggggaattccgtcggaacggggccgagcagcgcagcatctatatccctgtttcttaccgcttcgattaaaaacttataagaaccctggcggagcaaaaactcaacgttcgggtattcctctttaaatgccgaaatcacagtcggcaaaagctggcttgcaaggctcgtcggaaatcctattttgacggttccgcgattcggatcaagatattcatcaatttgttccttcgcataatcaattgctttcatcgccgttttaacatgttctaaaaattgtttgccgatcggcgttaatttaatatttctgccttcccgttcaaataaagtgactttcagctcttcttcaagatttgcaatctgccggctgatggcggattgtgcgacatgcagatgatcagccgcttctgacacatgttcccgttctgctacctccataaaataccgaagctggcgtaattccattgcgttcacacccatctatctcattttgagatgtatttgatctaaattatatattgtttatattgttttgaaaacttacaattaatttaaagttgtcagattttatgaccgataattaacggaaactgatcgggggagaggaattatgacttacaatcaaatgccgaaagcacaaggtctctaccgtccggaatttgagcacgatgcatgcggaatcggcttgtatgcccatttaaaagggaaaccttcacatgacattgtcaaaaaaggactgaagatgctttgccagctggatcacagaggaggacagggcagtgatccgaatacgggtgacggcgccggcctgatggttcagatccctgatgctttttttaagaaagagtgcggagaaatgaagctgccggaaaaaggccgttacggggtaggaatggtctttttctcgcaaaatgaagaggaaagaaaaaagatcgaaaaacaggtgaatgcattcattgagcaggaaggacagatcgttctcggctggagaaccgtccctgtaaatgtcggaaaaatcggaacagtggcacaaagcacttgcccgtatgtgcgtcaagtatttatcggagccgcaaacgatttgaaagacagccttgcttttgaacgcaaattgtatgttatccggaagcaggctgaaaattggggcgttcaagaacagcttgatttttacttcgcaagcctgtcaagccagactattgtttataaagggttgttaacgcctgagcaggttgacgctttttatttggatttgcaggatgaaaccttcgtatctgcattttcactcgtgcattcaagattcagcacaaatacctttcctacttgggaacgtgcccatccgaaccgctatctgattcataacggagaaatcaatacgctccggggcaacatcaattggatgagagcgagggagcagcagttcgtttcagaaagcttcggagacgatcttcacaaagtgctgccgattttaaatgctgagggcagtgactcatccattcttgataatgcgtttgaatttttcgtgatggcggggcggaaaccggcacatacggcaatgatgctgattccggaaccatggacggaaaacactcacatgtctaaagcgaaacgggctttttatgaatatcacagctctttaatggagccgtgggacgggccgaccgccatttcgtttacggacggaaaacaaatcggcgccatccttgaccgtaacggcctgcgtccggcacgttactatgtgacaaaagatgaccatattattttctcatctgaggtcggcgttattgaagtggagcagaagaacattcttcataaaaaacgtctggagcccggaaaaatgctgctcattgacttagaggaaggccggattatttcagatgaagaagtaaaaacagaaatcgccaatgaattcccgtatcaaaaatggcttgaagaagaattggttcaagtgaatcctgacccggaaatccgggaagaggaacaattcgatgatcttctcgtccgtcaaaaagcgtttggctatacgtatgaagatatccagaaatatttaattcctgttattaaagaaggcaaggacccgctcggctctatgggaaatgattcgccgctcgccgttttatccgatcgcgcccaatcactgtttcattactttaaacagctgtttgcgcaagtcacaaacccgccgattgacgcgatccgcgagcagcttgtgacctctacggtgacatggcttggggctgaaggtgatctgctgcatccgagtgaaagaaatgcacgccgcataaaattgtatactcctgtattatcaaacgaacagttttatgcgctgaaaacacttgtgcaccctgatattaagagccagaacatccgcacgctgttttccgatgacctggaaaaaggcctgaaggatttgtttcagcaagcggaaaaagcgatcaaggaaggcgtatctctgttaattttatctgacagggcaatgagtaaggaattgacgccgattccgccgcttttggccgtcagtgcgctgcatcagcatttgatccgtcaaggcctgcgaacaaaagcaagcattatcgttgaatccggggaagcgcgtgaagttcatcactttgcggctctcatcgggtatggtgccgatgctgtcaatccgtatttgacttatgctacgtataagcaggaaatcgatgaaggccggcttgatattccgtatgaagaagctgtcagcaaatacggaaagagcgtaacagaaggcgtcgtgaaagtgatgtcaaaaatggggatttcaactgtgcaaagttacaggggcgcccaaatttttgaagcggtcggcatcggtgaagacgttatcgccaaatactttaccggtactgcatctcagcttggcggaatcgatatcgagacgattgcgcaagaagcgaaacagcgccatcaagcggcgtacaaggatgattacagccaaactcttgatcctggaagtgaattccaatggcggaacgggggagagcaccacgctttcaacccgaaaaccatccatacgctgcaatgggcctgccgaaaaaatgattacagcttgtttaagcagtattctcatgcagcggatgaagaacgaatcggatttttacgcaatctgttcgccttcaaagaagaccgcaagcctttaaaattagaggaagttgaatcagctgcgtccatcgtgaaacgttttaaaacaggagcgatgtcattcggttcattaagcaaggaagcccatgaggctttagcgatagcgatgaacaggcttggcggaaaaagcaacagcggagaaggcggcgaggacccgaaacgtttcgttccggatgaaaatggcgacgacagaagaagtgcgattaaacagatcgcctccggccgtttcggcgtaaagagccattatctcgtcaatgcggatgaattgcagatcaaaatggcgcaaggagcgaagccgggagaaggcggtcagcttccggggaacaaagtatatccttgggtcgcggatgtccgcggttctacaccaggtgtagggctgatctcaccgcctcctcaccatgatatttattcaattgaagatttggcgcagctgatccatgatttgaaaaatgcaaatcgaagcgcgcgaatcagcgtcaagctcgtgtcaaaagccggtgtcggcacgattgcggccggtgtggcaaaaggcactgcggatgtcatcgtcatcagcggctacgatggcggaacgggcgcatcgccgaaaacgagtattaaacataccggtcttccgtgggagcttggtcttgcagaagctcaccaaacgctgatgctgaacggtttacgggatcgcgtggtattggaaacggacggtaagctgatgacaggccgagatgtcgtgatggccgccttgctcggtgcggaggaattcggctttgctacagcgccgcttgtcgttcttggctgcatcatgatgcgcgcctgccatttagatacatgtcctgtaggtgtcgcgacgcaaaatccggagctccgcaaaaaattcatgggcaatcctgaccatatcgtaaattacatgctgtttgtcgcagaagaagtgcgtgaatatatggcgcagttaggctttaagacgcttgatgaaatgatcggacggacagacgttcttcatgtcagtgaacgtgcgaaagcgcattggaaagcgggccagcttgatttatccacactgctgtaccagcctgaaggcatacgcactttccgtacggcgcaaaaccataaaatcgacgagtcgcttgatatgacggttattcttccggcggtgcaggctgcaattgaagccggtcaggaagcggaagctgaaatcaagatcaataatacaaaccgcgtagccggaaccgtgacgggaagtgaaatttctaaacgctacggagcggaaggcctgccggatgatacgatcagacttcattttaccggatcagccggacagagtttcggtgcatttgtccctaaagggatgacgcttcatttgaacggggattcaaatgactacgtaggcaaagggctttcaggcggaaaaatcatcgtgaaagcgcctgatgccttcaattatgaaacacacgataacgttattatcgggaacgtcgcattttacggagcaacaagcggggaagcgtacattaacgggcgcgccggtgaacgttttgcagtccgtaacagcggagtcaatgtcgttgtagaaggtatcggagaccacggctgcgaatacatgacaggcggccgggttgtcgtcctcggcgaagtcggcaaaaacttcggggcgggaatgtcaggcggtatcgcatacgtcctgagtgaagatgccaaagcatttaaacgcaaatgcaacatggaaatgatttcatttgaaaagctgacggatgaggcggagatcaaagaagtgcaagaaatggtcaaacggcatgcggcgctgacaaacagcaaaaaagccgcaaatctcctggacaattgggaaaaagccgcagaaacctttatcaaagtcattccgaaaaactataaacaaatgctcctcagcatcgaagaacaaaaagcggcgggtttatcagaagaagacgcaattatgtatgcttttgaagccaatacaaaggttcagcaaacgcctgccaaagatcaaaaacaagcggtagtacagtaagaaaggggagaggaacatggggaaaccaactggattcatggaagaaaaacgagaaaaaccggctgagcgggaccctctcactcgcttaaaggattggaaagagtattcggctccattttcagatgaagcgtcaaagcggcagggggcgcggtgtatggattgcggcacaccgttttgccaaatcggcgctgatatcaacggttttacctccggatgcccgatttataatctgataccggagtggaatgacctcgtctatcgggggcgctggaaagaagccttggagcgccttctgaaaacgaataactttcctgaattcacagggcgggtctgtcccgctccttgtgaaggatcttgtacgctggccatttcagatccggctgtttcaattaaaaacatcgagcggacgatcattgacaaaggttttgaaaatggatggattcagccgagaattcccgcgaaacgcacaggtaaaaaagtcgctgtcgtcggttcaggcccggcaggtctggcaagcgctgatcagctgaatcaagccggtcattccgtaacggtctacgagcgtgccgacagagccggcggcctgctgatgtacggcattccgagcatgaagcttgagaaaaatgtcgtcgaacgccgtattaagcttttgacgcaggaaggtatagattttgtgacaaataccgaaatcggcgttgatataacggcagatgagctgaaagaacaatttgatgccgtcattttgtgcacaggcgcccaaaagcagcgcaatctgctgattgaaggccgggaagcaaaaggcgtccattatgcgatggactatttaacactggcgacgaaaagctatttagattccaacttcaaagacaaacaatttatagacgctaaagggaaagatgtcatcgtgatcggcggaggagacacaggagctgactgcgtggcaaccgcgctgcgtcaaaaagcgcgcagcgtgcaccagttcgggaaacatcctaaacttcctcagacgcgcacgaacgacaatatgtggcctgaacagccgcacgtctttacccttgaatacgcctatgaagaagcgcaggcaaagttcggcaaagacccgagagaatattcaattcaaacgacaaaaatggtggccgataagcagggccgcttacaagagatccacaccattcaaatggaaaaagtcagaaacgaattcggaaagtatgaatttcatgaactgcccggtacagaaaaagtctggcctgctcagctggtgttcatcgccatcggttttgaagggacagaacagccattattgaaacagttcggagtcgattcggcaaatcataaaattcaggcggcatatggggattataaaacgaatgttgacggtgttttcgccgcaggggatgcgagaaggggccaaagcctgattgtatgggcgattaatgaaggccgggaagcagcgcgcgaagtcgacagttatttaatggggagcactgttttaccgtaaataaaggggtttatttataaaaccggctgggatcagccggtttttcgtattgaaatggaacctccttcttcttgtattggtcatataaaggtaatgtggaaatggaggataaatatggaattttgttttacagagcggagagattgtttttttccgcagactgatacgatttgcaagccttgcgcaatcgatcagggtgctgctgacggcggaagtcatcgctgccgtttaaaatgacgccttaaaaaacatgacgggctctgtgtgtctgcagtcgatttgcgggcagattttaatcgatgaagaaaaacatattgaatttcaagcggaaacgcttaaaaacaaataagggaacggacgggtccgttcctttttttagacatctatacgaaagccgatattgccgaactgccgtccttcccgcattctgttaaaagcgggagctgcttcactgagagggtacatgcggtcgataatgggacggagctcgcagcggtttatcaattccagcatatccgcgaattcctcattgcttcccattgatgtaccgagaatatgaatctgcggaaaaaacagcgagcgaatgggaaatccgagctgatcgcctgaactggcgccgaatgttacgatccggccattcggtttaataatgtcaagatagtgttgatataaagcggggcctacaccgtcaagtatgatatctgctttttcgccattcagcgcctcattccagtcaccgtagctgtcaatcgcccggtctgcaccgtatgacagtgcggtttgttttttgttttcactgcgggaggtgacgctgactgtcgctccgatagcttttgccattaataaggcatatgttgccacgccgcttccgatgcccggaaggataaggtgttcgcctttttttaattgtccttttgtaaataaggcgcgataagcggttaatgctgataacggcaggacgcccgcttcctcccaagtcaggtgttcgggttttaaaacggcattttccgcaggaacgatgacataaggtgaaaatgttccgtcgctcggaccgcctaaaatatcagggacggctggtacgtcctcaacagtcttccaattcagtaccgggttgatgatgacttctgcattcagtaaatgagaccggacgccgtgtcctatttcggttacgattcccgcgccgtctgaaccgagaataaattcatggtttccggtttcgtgttttttcattaaaaacaaatcacgatggtttaatccggctgttttcagctttatttttacttcgccgtttcccggccttttgtcaggtgcctgcctgaaattaaagccattttcgtgtatgataaggacattcatgattcttctctcctttatgattgatgagaaaaattttacaggctgtatcagctgcagtaaataaatgaaaattgatagccggctatcaataaaaatcatagcaagaaggtgcccttagatggaaagcggagacttaaagatttttcaggctgtcgcccgcaaaggaagtatttcaaaggcggcagaaagcctgcattatgttcaatcaaatgtgacaaaccggattcagcagctggaacggcaattgcaaacacagcttttttaccgcacaaatcggggaatgacgctgacgccaacaggtgaaaacttattaaaagacgcagacagaatccttcaattgctgcatgaggcgcaaaaaacagcgcgagaggcaggcgatccgaacggcccgcttcgaatcggttctcttgaaacggcggcagccgtccatctccctcaatttttcacggagtattgcagccgctacccgaaagtacagctgtctctgtcaaccggtgatacacataccttagtgcagcgcgttctacactatgagctggacggcgcttttgtttacggaccggtcgaatatgaagatcttgagcaagtcgctgtatttcaagaagaattggtcttggtttcaaataagcgggaaggcagtttgcaagacttgctgcgagagccgattctgtattttgccgcgggctgttcgcaccgccgcaaaataaaaaacatactgaaagaagaggcagtgcccgcacataaaatcattgaattcggtacgttggaagccattattggggcggtgcaggcggggatgggggtctcctttctgcctgcatcagccgtccgttattttcaaaacaggaaaaatctttttcttcatgagcttcctgaacattttcggaatatgaatatatcattcatctaccggagtgatttatttttaacatcggcgtttgaagaactgctgaatggattaaaaacattatcgaacagaagatgagaaaacaggacagctgtgtacgccaattttttttcgttccggtttttctcaaaaagaaagcgggtatccgggctgagctcgatcagcgtgatgaaaaactcggctataaaatcagagaagcacaaatgaaaaaaataccgtatatggcggttgtgggagatcaagagtgccgccaccattctgtacatgtaaggcaatacgggcgggaaaacacatttgaagagaatgtgagtgattttatttcccggatcataagagagacaaaacaaaaaatagagattcaagaaaaataacattgacatatcgcaaaatcacgatataataaagcgtatgaaacctattgatgtttttaaagcgttgtctaatgagtcacggcttgagattttacaatggctgaaagagccggaccgtcacttcgcaccgcatgatggcattgatatgaatgagatcggagtatgtgtcagccagatcaccgataagcttcagatgacacagtcaacggcgtctcaatatctttccattcttcagcgcgcaggccttatccaaacaaaacggattggcaaatacacctattataaaagagatgaagatgcgataaaggcgatggccgattattttcagcgcgaaatgtagggctgaatcctttagaagagggattcagtttcttttttcgactacacatcgacatattgcgatttgtttctgtttgttcaattctttatatcgatatatcacaatatatctttatataaattatcaatgaaggagtgtgtcaggtgcaaaatacctggaagatttacattttggcaattatcagctttttagtggggacgtctgaatatgtgatatccgggatgcttgataaaattgcaggttccttgggagttactgtggcagcagcagggcagctgattacgattttttcacttgtttatgcaatcggaacgcctgtcatgatggcccttacagcaaaactggacagaaggaagctcatgatctatgctcttggattgtttgtaatcggaaatatcatttcatttcttgtacagggatacggcttatttgcggcagcccgggtgatcatggcgcttggagcaggaactgtggtggtcaccgcgcttacgatcgcagcaaaaatcgctcccccgggaaaacaggcaagttctctcgcgaccgtcattatggggtttacggcggcgctcattatcggtgttccgatcggaagaaccgtgtctgaagcttttggctggaaggtggttttcgccggaattgcggcaatcggaatcattgccatgcttattatacgttttgcgttgcctgagataaaaggagataaaccggtgccgcttattcagcaattttctcttttgaagaaacgaaaggtggctgtcgggcttgctattacgtttttttggctcggaggctattcggttgcgtatacgtacctttctccgtatttactgaacgtcactcatatcggcagcggaatactgagtacattgctgcttattttcggtgttgctagtcttgccggttctaaagcaggcggtttcagtgctgacaaatggggggcgcgtatgacattaaccggcggaatggcgcttcatgctatcatgctcatgttattgccgtttgtcacacattctgctttcggagcggcggcagtgcttattttttggtccttcgccgcctggtcatcaggacctgctcagcagtatcatttggcaacgatggagcctgaatcatcgggtgtattacttggcctcaaccagtctgtgatgcagctggctatggcggccggggcgggcatcgggggcattgttgtcactcatctgtctcttgcgtcagtgacatggatcggatcagcgggtgttgtcatcgcgatgtgcggcgtgctttcacttgcctcgttaacatctgaaaaaccctcatctgaatacagtgcagaataaacaaaagcctcatttctcagcttgagaaacgaggctttttgcctagttattttttatattgtttcaagtttacgccgattgcggctccgtttcggcttgagtcggcaactccggtaaaggtgccgttttcacgatcgatcaggatgctttgcacattaccgatatcaaccgggctgctgccgaatttatgccccatttcgttcagttttgtgcgggcttcttccggcactcctttttcatatctataggatgtcatgctgtttgtgtaaattctcggctcttcgaccgccgctttcagatccatgccgtactcgactttgttcaggatcgtttgcaggacggaagaaataatcgttgctccgccgggagagccgacagtcaggacaggttcgttatttttgaataaaatagtcggagtcatgctgctgagcggacgtttattcggctgcacttcatttgcgccgccaggcaccgcatcgaagtctgttaactcattattcaacacaacgccgtatccgggaaccataatgccggaaccgaacagctgttcaatcgttgtcgtataagatacgacattgccgaagcggtcggttaccgtgaagtgggtcgtttggccttcttgtttgtcagtcggctgcttcacttgtttatagtttgcagaaccttcctgataggcccaagggtcgccggctttcggttttttattgactttatcaatatctatcagctgtctgcgggcattgatataatctggattcaagaggcctttgagagggacgttgacgaattctggatccccggcaaatgcggcgcggtcagcataagccaaatgcatcgtttctgcgagaagctgatatttttgccaagaacggatatcatattgagaaagcttaaaatcatccagaaggttcagcatttgcaacaggaaaacaccgcccgagcttggaggaggagcagttgcgatatgatagccctggtaatcccccagatcggttcgtcaatcgtcacattgaagtttttgatatctttttctgtcattgagccgccgaattcctgcactgtttccgcaagctttttggagaatgcaccgtcatagaatgcttttgtgcctttgtacttaatagctgtaaatgttttggctaagtctttttggatgagtgtgtctccttctttcagaggttctccgtccggaagaaacacgtcttttgcagcggtgtgtgataatttgtttttataatctgagatggcatcagctaaaaccgaatcgatcggaaagccttttgaggcaagtttaatggaaggggtgatgagttgtttcatggagcgtgtgccccatttgtcgagcgctttttcaagtccttttaatgttcccggaacaccgactgcagtccctttagtaacgcgttcggagaaagggatggctttgccgttttcgtcaaggaacatatccggtgctgcgcctgccggtgcgcgttcccggctgtcgataatggtggtgtctttcgtcttcgcatcataaaccatcataaatccgccgccgccgattcccgacatcataggttcagttacgtttaatgcgaattgaatggcgaccgcggcgtcaattgcattgcctccttttttcagcacgtcggcaccgatttgtgaagcgagaggatgggcggtggcaaccatgccgtctttgccgacatctacctgtttgtagtcgtcataggaaaacgggtgtttcttagcctgagcgtgataagggatgcttccggccgtgagcaaagtactgagcagaacgataaaacagagattcataaactttttctttttcatagtctgcctcctttgttttccgcttacaattatagagtaagtaaaatgtgctgttttcacaagtgacaaacggaatagtccggtgcgcaaaaagccggagtttctgtgtgaatgtaatcagtcgcaaataggctaaatgggaaaccgggcagaaaaagctgtgaaacaagcataaagacaaaaaataagctacaataaacaaaacagaattcactcacatgacatatgaaaggaacgtgagccatgtatttaacgatcaaagagacagctgagtttaccagtcttcctgaagaatatgtgcacaatcttgttttgacgaataaaataagggccgtacatgacggacagcaatatttaatcaacaaggaacaatttcaaacccatctcgaacagctggaaaaatataaggaaatgattcaagagtttttaaatgagccgcttcctgaagacattgatgtaaaagatgaagactaggacacaatttcatattgtgtctttttttttcatttttttcggttgctcacaaaaaaacgaatgctcagatttcgttttaagggcgttgtttttcttttttaataccgtgagtctctgttgatttaaaatcccgtcatcgggtcgaaaatgatgttttgaagacttcgatgaaactgcgtgccttattccccttatgtaacactatgtatattatgttacataaggccctttatcctttatcattcaacaggtttcggctataatagtaacataatgctcaatatgttactttaccaattataaggggttttttgatgcatatcgtacagccgatccgaagtttggagaagatccaggaagtcaaacagtatttaatgaagaaaagtgatcgtgattattttttatttattttcggcatgaacagcgcactgcggatttctgatgttctgccgcttcgcgtgagggatgtaaggaacaaagaccatgtgtgggcaaccgaaagcaaaacgagaaagaaaagaaaaattctgatactggagtctttgaaggccgacatatacgcttatacaaaagacatgaaagaggatgactatttgtttaaatcgaaacggacgaataagcccatttcccggattcaggcatacagaatattaaaggaagcagctgccgcgtgcggattggaggaaatcgggacgcatacgcttagaaagacgttcgggtatcatttttatcagaggacaaaagacattgctgaactgcagaggattttgaatcattcttctccgtctattacaatgcgttatatcggaatagatgaagatacgacgagagccgcctataaagtgttcggagggctgtaggcttgaaaaaaacggccgccagcgttactataatagaagcaggctctagtagcacagcggatagtgcagcagtttcctaaactgcaggtcgggagttcgaatctctcctagagcgttttcgacataagataggtgcggattaataatgtcggcaagacagaaaaccccttgttatacaaggggtttttgagtttaatattttgcaagaacctggtggaaatgatgtgaaaaaagcccgctgtaagcaagcgggctttttcttatatgacagcatcaaattgattgactttccaaacgttgttttcttttacgaatgttacatcgcgttttgctgacggtgaaccgtcaagagtcggtacagtgaagcggtatgtttgaacgcttccttttttagaaagaagagtcatttttgcttttttccaattcaggaggttatctccgtcgccgagcggaacagccaatttgccgtcttttacagtgaagtggtaatctttgagccctttgtcaatcgcttgctttgtaaaagcgggtgtcagatattttacggctttcgcttttgttccgaggtctttgcacataaagacgtattgaagattttgatattcaaacggttcagatgtgcagtttgcgtttgatttaagcgcaccgccgctcatcgtgttccagaaatgttctctcgctgacagggccagctgaagtgcttgtttttgtgtaaggtcattaggtgcattttttgcggtcgccgcagtgcccaatgacagaatcaatgtaatagtagtgaggaataatagccattttttcatgatataatctctccttcaatcaatctctttctcttatgttacaaatgttacaataattacgataagattacaataccttttcagaaatattttccggactttttatttttatggtttatttccatgtaagacgtgagaataagataaagagtttcattgaacaaaaggtttttacaagctgtctgctgaataataaaatggaagaaaatcaaaaaaggagtcctacatatggaagtacaagatcatttagaaacagcggaaggccgcggccagtctgtctggcgatcgatgtcactgtttttagtgccgctgcttttaagcaatgtattgcaatctgtcggccaattggtcggaatggtatttgtcggaaggtggctcggagttgatgcgcttgccgccgtatcgtctttttttccgctgttttttctgctgatctcctttacgatcggaatcggttcgggaagttccattctgatcgggcaggcttacggcgcgaaaaacgaagagaggatgaaggcgattgtcggcactacactgacttttacctttatgctcggtgttgttctggcagttgtcggcagtgtgtttacgcttgatattctgcggctgatgggaacgccggaaaacgtaatagatgtcagtgtccgatatgcgcgtattttgttttgcgcaatgccgctgatgtttttatattttgcgtatacgacatttttacgcggaacgggagattcaaagactccgttttatacgttaatcgtcagtacagtcataaacatcggtctcttgcccttattgattctcgggcttttcggacttccgaagttcggcatttacggttcggcgtatgcaaccgtgatttcaaacatcgtgacatttatcgtactcatggtttatttgcggaaaaggaaacatccattggcatttgaccggactgcgctccgttctcttaaaatggacaaaaagctgctcgcgcttttactccgtctcggtattccgtcaagcatcaatatgattctcgtatcactttctgaaattgcggtcatttcatttgtcaatcattacggatcaaacgcgacggctgcttacggggtcgtcaaccaagtggcgagttatgtgcagatgccggcggtaagcctcggtatcgccgtttcaatttttgccgcccaatccattggcgccaatcaattcggccggctgaagcaggtcatcaaagtcggcatcggcctgaattatttgatcggcggggttttgattgtgctgatttacaccttctcccggcagatactggctttgtttttaaccgatcaggatacactccgcattgcccgcaatctgattatgattaccctttggagctatctgattttcggtcacgctcagattgtttcagcaacaatgcgggcgagcggtacggtgttatggccgacgattatcagcatttttacgatttggggaattgaagtgcctgtggcctttattctttctcattatacgaatctcggcattctcggcatttgggtcggttatccggcggcttttgtcgtcagcctgctgctgcaatacggatattaccggtttgtatggaagaaaaaacagattacccggctgattcaataaggttttaccgcacatcgctcagttcatacgggcgatgttttttttagagaaggaaaatgagtttagaaaatggaattcctatacatgctagaaaacaaggaaagggcaggtgcttatgacgattgaacatacgacttatttaggagtttcagccataaaggcggagactgatcaggctgaatgcatcattgtgccggagtggggatcaaatgtcatatcgcttcgggataaaagaaccggtatgcggcttctgagagaaccggaaactgcggaggaattcctcaaaaaaccgatgctgtacggcattcccgttttattcccgccgaaccggattacggacgggacgtttcgttttgacggccgctcgtatcaattcgagataaacgaagaggataaacataatcatattcacggctttcttcacaatcagcattggaaagcggcagcagcgaaagaagagggggatggaatgacagtcgaaacagaaattgatctttcaaagattccccgtgttcataaacaatttccgcacgatgtcattgtccggatgacctatacattaaaagacaatgtgtttacgcagcgggcgctgattatgaataagggaacggaggcttttccttgggggctaggctatcattccacatttgttttcaatgaagagcaatcccgtctatttttgacggctgaccgcatgtgggaattaaatgaacgtttcgtaccgacgggccgtttattggatgttcctgataaagaagcgttccgtcatgggatgtctttgaaaaataaacagtttgacgatgtttttctttcttccggacggaatggcggcaataacgaagctgttatttatcatccgaatgagaaattatccgttttgtatcaggcagacacgtctttcaagcattgggtggtatataacggtgacggaaagcaggggtttgtcagtcttgagccttatacttccgttacagatgcatttaatctgaatcagcctgcatcactgacagggcttcagattctgaaaccgggcgaagaagcggctgcgtcatccgggatcaccattttgcatgacgaagaataggaaagaggcgggataacattgaaaacatatgtgaaacgcttgtgcgcggtgattctgcttttgatcattgccgaagttccttatattgatgatgcggctaaggcggctgaacaaaaaaatactttgcaaaaagagctggaacacattctggatgaagaacccgctttaaagggggcttcagcgggcatcattgtccggtcagcaaaaacaggggaggtgctgttcggcagccgggaagatatgcggctgaggcctgcatcattgatgaaactgctgacggcatctgcggcgctttccgttctcggagaagattacacctttaagacagaagtacgggcagacggcgccgtgaaaggaaaacagctgcgcggaaacctttatctcaggggaaaaggcgatccgaccctattggcttctgattttgagaagatggctaaacaggtcaaagccagaggcatccatgtcattaaaggagatctggtcggggatgattcgtggtatgacgataccaggtattcagttgatcttccgtggagtgatgaaggccaatattatggcgcgcaagtatcagctcttaccgcttccccaaatgaggattatgataccggaacggtgattgcggaaatcagcccggcgaaacagcccgataaaaagccgcgcatttcaatttctccctatacggacatcgttcgtgtgaaaaatgaagtaaaaaccgtcgcttctgatgaaaagaaagaattgacggttgaacgggagcacggtggcaatgtgattacgataaagggagccatacctgccggctcggcaaaggcaagagaatgggcggcagtgtgggatccgtcgtcctatgctttagatttatggaaacaagcgcttactaaacagggtgtaactgtaaaagggaaaatcagaacaggccgaatgccgcaccgcacccagcttgtcacatcacggacatccatgcctctttcagaattattgatcccgtttatgaaactgagcaacaacgggcacgccgaaattctgatcaaggaaatgggaaaagtgaaaaaaggggagggcagctgggaaaagggcttggacgtgatgaaatcggagctcaaatcgttcgggctcaatccggatgaattgattgcaagagacggatccggcgtttctcatattaacggcgtatccgccggccaaatcggagagcttttgtatgcggttcagaaagagaagtggtacccggctttccttcgttcgctccctgtcgccggtgcaagcgacagaatgacgggaggcactcttcggaaccggctgaagaatactccggcagagggcaaaattaaagcaaaaaccgggtcactaacatcagtcagttcgattgccggctatgcagacacaaaaacaggagatacgcttattttttccgtgcttcaaaacgggctgcttgacgaagatgacggaaaagacattgaagacaaaatcgcagtcgtgctggcaaatcaataagaagggccggatccttagagggttcggcttttttgatgtctgtaaaacattatattgcgattatgaatcaatcttttcaaaaagtaatatcggcaacattcttccttttttttacatgatactttcttacttgttcactgatttttcattttttatcataaaatttcttttcggaaagcaaaacctttttaaaagcgcaattaattatacattttattccttattatagtgttttagaaccagtttgcagtgtacatacatactgttttacatggtataaaaattatagaaatgaagaagtgaagtgaggaatatatactatattctaaaaaatgttagaaaaaatttaattttttattgtgatttctaaaatatgttttaaaataatgcttatatggatgatttagtcatatgctgtcgaaatttaattgtaattatttcactttcttatcctcttaaattgaaatggagggattccattgaagaacactgtttattctttaactcacgcccaaagaagagtctggtttacagagctgctcgagccgggcacaagtatctgcaatcttgcggcgtgcgtcaaattcagggggaatatcgactttgacgtattgcgccgtgctttagatttctctatcttgcaaaatgattcgctcaggtttcaactgacggaaggggacggctcagaaccccagctgtatctggccgggcatcggccgatttctttagagaccgttgattttactcatattgatcaatcagagcgggatgcatggattgacaaacagacgcgtgttccgttcaagctgtttcattcaccgctgtatcattttactctgcttgtcatgtcagacgaagaagtttggctttattcaaaatttcaccatattattatggacggcatctcgctcaatctgcttggcaatcagctcattgaaatctaccaaaaaatcatgcgaagcgaggatttggccgaacaccaaagcccttcctatctcagctacatggaaaaagaacagcaatacctacagtcttcccgttttcaaaaagaccgttcattttggactgaaacataccgaaccgttccggaacacctttcactggcggaacgaacctctcatcttagacaaagcactgcagcttcaagagatacaatcactctttcccactccttagaacaatcaatccggcgtttttgcaaagatcataatgtcagcatcatctctctgtttatggcttcgttatacatatgcatcagccgtctgacggctaaaaaggatattgccatcggtacttattacggaaaccgcggttccaagctcgaaaaggatatgctcggcatgttcgtcagcacgctaccgatcagaatgacggcagatccggatgcggagttcgtgtcttttgtccgcagtgtaggaaaacagcagctgtctgttatgcggcaccagaaatatccttacaatctttttgtcaatgaattaaggcagattcatcacgacctgcaaaatatcatcgggatttcgatgcaataccagcctctcgcgtggcgtcaggcagaaggtttcgattatgaaacggcgatgtttttcagcgggcatacggcaaatgagctgtccattttaattaaggagcggacagatacgggattgattgagctgaattttgattatcaatccgctttatttactaaaacatcgattaaacgaattcaaactcatttgctgacgatcgttgaaaatgccgttagaaatccaaaccggctgattcggcatattgatatggcggatgaaaaagaaaagaaacgggtgttaactgcgtttaaccatacagaaacggctgaaccgccggccccgacgcttcacgggctgtttgcccgccgcgccgcgctttcgccgcatcgtccggcgctccgttttccgggcggtatgctgacgtacgctgagcttgaccagtacacagacaggctcgccgttcggctccgccaaaaaggcatccgcaaagaaagcatggtcggcgtactcgctgaacgctcgccggagatggcggtttcagtgcttgccgtgttaaaagcgggcggcgcctacgtgccgcttgacccggagtatcctgaggacaggctgcgatatatgcttgaggacagcggcgcttgtctcctgcttgcacagccggggttatccgtttccggtttttccggtgaaacgctagaagtgtctctttcttctctgacaaatgagacggagacaggggctgtctctgaagaagcggatgctgattcgctcgcttatatcatttatacgtccggttcgacgggaacaccgaagggagtggctgttgaacaccgtcaagccgccgcctttttatcagggatgcaagggcagtttccgttaacggaagaggatattatcgtgctgaaatcatccttttcattcgacgcctccatctggcaattgttttggtggacgatgtccggcgcctccgtgtatctgcttccggccggctgggagaaagatcctgtgcggatgattgaagcgtttgcctcagaaaaggtgacgaccgcgcattttattccggcgatggtcaacagctttttagacgcgctggaaacagagcctgcggaaacaagaacacgcctcggcagaacactgacacgcgtgttcgccggaggggaagctctttccccgcttacggctgcccggtttgccgatcttctgccggagaccatgcttattcacggctatggaccgacggaagcgacggttgatgcggcgttttacgtctgtgaccgaaaacgggacagcggacggacaaggcttccgatcggaaaacccgttccgggtgcccgtctgtatgtattagatagcggaggaaccatccagcctgcgggcgtggcaggagagctgtacatcgcggggaccggcgtggcccggggctatctgaaccgccctgagctgacggaggagcgctttgtcgttgatccgttttatccgggagaacgcatgtatcagacgggcgatatcgcacgctggacagaagacggccttgtcgaatggctcggtcgttcagacggacaggtgaaagtccgcggctaccggattgaaccgggggaaatcgaagcggcgatccggcacatcgacggcattcgtgaggcggcggtcaccgcccggaccgaacacggcgaaaccgcgctttacgcctatattgaaggacgaaaaagcgatgacgtgcgggcggagcttgcgacacgccttccggcctacatgatgccggctcagtttatagagatgagcgaatggccggtcacgccaagcggaaagcttgaccgccgcgcgctgccggctcccggcggatcggcagacagacaggcgtacactgccccgcggaacgtcacggaaatgaagctttgcgccctttgggaagaggtgctgaaaaacggccccgtcggcatccgggatcacttttttgagcggggcggccattcgttaaaagcgacggctctcgtctcccgcatcgccaaagagttcggtgttcaggtgccgttacaggacatcttcgcccggccgacggtggaagagctcgcttcggttattcaggacttggaagaaagctcgtatgaagcgattcagcctgcgcaaacacaagatacctacccggtgtcttcagcgcagaaacggatgtatgtgctccaacagcttgaagacggcggtgtcggctacaatatgccggctgtgctggaactgacgggcccgcttgaccgtgtccggctggaggagacgttccggcagcttgtggagcggcacgagtcgctcagaacgtcctttgaaacggggcctgacggcgaaccggtgcagcgcatccatgacagcgtgccgtttcagctcgatgaggccgagtcagctgacgcattcgtccggccgttttgtctggaggaagcgccgctcttccgtgcggccctcgtgaaagaatcggaagaacaccatcttttattaacggatatgcatcatattatttctgacggtgtgtccgtcaacaccttgataaaagaattcggcgagctgtacgcaggccgttcgcttgcgccgatgcgccttcaatataaagactatgccgtctggcagcggtcgtttcaggagaaagaaggatatcagaagcaggaagcctattggctgaagcggcttgaaggagagcttccggtgcttgaacttccggctgacaagccccgtccggcggtcagaagctttgcgggcggcagcgtatcgtgcacgcttgacgctgacacggcatccggccttcaccgcatcgcccgggatcacggctccactttgtatatggtgcttctcgccgcgtacaatacgctgctcgcgcgattgagcgggcaggaagacatcatcgtcggatcgccgattgccgggcgcccgcacaaagaccttgaaccgattctcgggatgttcgtcaacacgcttgccatcagaacggagccgaagggggacaaacggttcaccgattatttggcggaagtccgccaggcggcgcttgaggcgtatgaacatcaggactacccgtttgaagagcttgtggagcggctcggcgtgcagcgggacatgagccgcaatccgctgtttgatgtgatgtttattcttcagaatatggagcgggaggagataaatctggccggtctgaaggcgtcacgatcaaagcataccgaacatgatgtatcaagttttgacctgaccttatcagcggctgaatccgatggaaacatccgctttgagatggaattcagcaccgagctttttatgaaagaaacgattgaacgctggatgggccacttactgaatctcttgcgccatgttgccgccgaaccggaagtcacactatcgaaagctgacattttggatgaagaagaaaaacaaaagttactgattgagtttaataacacacaaaccgaattcatggaaaaacacaaactgtttcaccagctgtttgaagagaaagcagaagaaacgcctcatcagaccgctgttattgaaggagcacaacagatcagctatttccagctcaatgagcgggcaaaccgtcttgcccgaacactgcagaaaaatggattcggtccgggaaaaagagcagccatattagcaaaccgttcgattgaagcgatcgtcagtgttcttgcggtcatgaaatcaggaggagcgtatataccggttgactcccattatcctgaggaacggattcgctatttattaaaagacagcgcggcatccgtcttgatggtgcagtcagaatacaaagaacttgcttcacagctgacggatcacaatttatttctcattcagcttgatcatgaagatcaatacgatatttccgcaaagaatattcagccgacagcgtcaccggatgataccgcatatatcatatatacttcgggaacaacgggaacgccgaagggagtcgaagtcagaaatcgcagctttacgcatgcagcacttgcatggcgcaggatttatgagcttgatcttataccggtcagagtgctgcagatggcgagtttctcatttgatgtattttcaggggatctagcacgcgccctgctaaacgggggaacgcttgtcatttgtccggatgacgtccggcttgagccgcagcagctttatcggctcattgatcagcaccgtatcacgtttatggagtcgacacccgcgctgattgttccgtttatggaatatatataccgccggaaactcgcgctgcaaagcgtaaaaatactggtacttggttcagatatgatcaagtcgcaagatttttatacgcttcatgaacgctttgggaaagaaatgcggatcattaacagctacggtgtaacagaagcgacaattgactcttcgtattatgaagccgaaatgagcgaagagccgcgggaagatgatgtgccgatcggtgttccgcttccgaatgtgcaaatgtacgtcttaaacaaagacaaacaggtccagccgatcggcgttttcggagagctgtatatcggaggcgccggcgtcgccaaaggatattggggacagcctgagctgacagaggacgcattcagtgacccgttacaaacgggagaaacgctttacagaaccggagatcaggcttgctggctgccggatggaactcttcgttttaaagggcggatcgataagcaggtgaagatcagaggctacagaattgagacgggagaaatagaaagtgtgcttttgaaacacgatcaagtcaaagaagcggctgttaccgtgatgaaagatgccgaaggacaagcacgattagcggcatacgtcgttcctaaagaggccgatatctcatcactccgccagtctcttatgcaggagctcccggcttatatgatgccgtctcatattatcggtttagacagcatgccccttacactgaacggcaaacttgataaatcggcattgccggcagaagagatacattcatcacaggcatttgtcgcgcccggcgatgaaaaacaggcgatgttatgccggatttgggaagatgtgcttcatattcagaaagcgggaattcatcactctttctttgagcttgggggagattccattaaggcgcttcaagtgtcagcccgactcgccggagaaggctggaacatgtcgatccgcgatttgtttcagttcccgacgattgcagaactcgcgaagcacctcacgccggctgttgcaacggctgatcagggcccgatagaaggaagcgctccgctgacaccgatccagcagagattttttgaggagccgggtgcgtttgagcttcattataaccaatcagtcatgctgtgcagtgaagacagcctcgaaatagatgcgctgtatcaggcggtttgcgcgctgacagaacatcatgatgcgctgcgaatgactttcactgaaaatgagcatggggaagttgttcaatataaccgcggaatcacagagcagcatgaagaaatctttacgcttaacgtcatagatctttcagaagaaacacagccggaaaaacggatagccgctgaggaaaaagaaatacagcaggctatgcgccttgatcaaggccctctgcttcatctcggagtgttcaggctgaaagaagccgaccatctgctcatcacgattcatcaccttatcacggacggcgtgtcgtggagaatattgcttgaagatctgcagacagcatatcagcaggcattggacggcaaacaaatcgaactgccgccgaaaagcgattcttatataaagtatgccgaagagctttttgacatttccaagagcaaagcattgctggaggaagccgcatactgggacagcgtgatgtctggtgaaacagcgccgctgccgaaaataactgatgaaaacgccggacgattgcaggaaaacgcgcgcactgcatcatggatattaagcagcgaagtcacgaagcagctgctgatggaaacacagcaggcgtacggaacggatgttcatgaattgcttttaacggcgcttggaatgacgcttcatgagtggacgggttccgaacagatccttatcagcactgaaggacacggacgccaggggcatattcctgacattgatatgtcaagaacggcgggctggtttacatctgtttacccggtgcttttggatatgagagtgccggacggctcaggggaaacaaccgcgcaccgcataaagacggtaaaagacatgatgagacgggttcctcatcacggaaccggctacgggctgctgagatattcgcgaaacattctttataaagacccagaaataagctttaactatctcggtgcgtttgacggtcttgaggggacgctgaagatgtcaccgttcaagccgcagcatgatatagcggccgggcgcatccgcgagtttgatctggatattaacgcgatggtggcggccgggcaactggaggtaaaagccgtttataccgatgtatttgcaccgggggcaatcgagttcttcatgaatcgtttccatactcacctcggggacatcatcgcccactgttccggcaagaaagagcgggaaaaaacattaacggattacagccatacagaattgaccgctcaagccctatcaagcattgaagatctcgtaaaaggactttaatttcataaaaaggtgtgtggcattcgtgacacaagcgacagaaattcaagatatttaccctttatcatatatgcaggaaggcatgctgtttcattcgcttctggattccggatcaaacgcatatgttgagcagatttcgtttacagtcagcggggatttatgcattgatacattccaaaaaagtctggatatgcttgtcagccgttatgatattttcagaacgattttcataaaagaagtgcctgaccttgaagggccgcagcaggttgtcctttcacgccgtgacactgccgtacggactgaagacatttcagattattcggaagaacggcagcaaagcatcattgacaaattcaaggaaaccgaccggcataaggggtttgatctgcaaaaaggccccttaatgcgcctgactctttttcaaacgggagaaaaccgccatacgtgcgtttggactcatcatcacattatgatggacggctggagcttgggccttgtactgaaagatttcttcagcatgtattatgcgatccggagcgggcggcctgtaaacctcggcagtccggctccttacagcacttatatcaaatggctccgaagccggaataaagaagaaacgtcagcattctggtcgcgctgcttggaagattacggagaaaccgtttccgttccgcaaacgaagaataagacggcgcaaaacggttatgcatctgagcatttccaattttcccttgagcctgaaaccgtacaaaaactgacagacattgcccgaggcatcggggtcacgctgaatactatatttacgggcatttggggtctgcttctccatcgttacaacgggactgaagatgccgtcttcggttcggttgtttccggcaggccttcagctatcagcggcattgaatccatggccggactgtttatcaataccgtgccggtaagggtgcgcgcggctggtgatatgactttttcttctcttctcaaaaaggtgcaaaaagagtcactcgctgcggaagagcacagctattatccgctttatgacattcaaaacgagagcggcctgcaaaaagatctcttgaatcacatcctggtttttgaaaattatccggttcagatgcaggctgcggtaaacggctggcagcaaacggaaagccatgcgctctcacttgaaaacttttcgatggcggaggaaaccaattacgatcttaacgtcgtcatcgttccgggagaagagttttatgtgaaattcagctacaatgcgggcatctacgatcgggaagacatgaaacggatcaaagggcatattctagaggtcatctcctgtgtaacggaagatccggacaggcttttatcaagcatcagtctcgtaccaccggaggaagaagccctgattcattcgtttaacgaaacgaaccgtccgtaccctgagacaaccgttcatgggctgtttgaagaacaggcggcaaaaacgcctgaccaagaggcgttgagatataacggggtaagctggagctacaagaaattaaatcagcgggcaaatcagattgcccatgcgttaagggaaaaaggcgcccgttcagatcagatcaccgctgttatgctgcgccgatcaatgagtacggttgccgctctgctcggaatttggaagtcgggcagcgcctatatgccgattgatgcggaatttccgcctgaacggatttcatttttactgagagacagtgaagcctcactgctcctgactgaaaaagacctgctccccctcattccgccgcatttcaaggggagcgtcgtcatcatggaggaaacggtttcccagcagactgcaccgcttccgccggtgtctgacagcggaaattgggcgtatgtcatttacacttccggaacgacaggccggccgaaaggggtgcttgtacaacacaaagcgatcagcaatacattgcaatggcggcgtgaagaatacgggatgacagaaggagacatagcgcttcatcttttttcatacgtatttgacgggtcattaacgagtcttttcactccgcttctgtcgggcgcctgtgtactgttaactgatgaagatgatgcgaaagacgtcctttcaataaaacagaaaatcgcccgccacggggtaagccatcttctgatcgttccgtctctgtatcgcgttctgcttgattcgctgacgaaaaaggatgcgcagacgcttcgggcggtgacatttgccggggaagcggccactcctgatatcgtggaagcgagccgcaacatatgcccgaatgccgagctgctgaatgaatacggcccgacggaaaacagtgtggccacgacgattctgcgcaacctgcaaaaaagcagccggattacgatcgggcgcccgattgccaacacttctgtctatatgatgcacggagatcggctgcaaccggtcggagccgtcggtgaactgtgtatttccggaaaaggtctggcggacggatattttcagcaaaaagagctgacggacaaagtctttacccctcatccgtttcgtaaaggtgaacggctgtacagaacgggagatgcagcccgatttttaccggacggaacgattgaatatatgggacgctttgacgatcaggtgaaggtaagaggttacagaattgaattaggagaaatcgaaacggcactcagaagtctgtccggggtaaaagaggcggcagtcatcgtgcgcaaaacggcggacggggaacaggagcttgcagcttatgccgtactggaaaacgcgggtgtgacatttgatcctcatgccgaattggccgggagattacctgcttatatgatcccgggaagctttaccaaattgacggaaatgccgctgtctgtgagcggaaaacttgaccgggccgcacttcctgagccgaaagaagccgagagaaccggtgattatcaagctccgcgcacaatgcttgagactgagctgctgtctatttggcaagaagtgctgaaacgggaacacatcagtatgagagatgatttcttccaaatcggcggacagtcgctgaaagccgcgtcgcttgtttcaaagatacataaacggctgcaaattgaacttgccgtccgccatgtttttgaacatccgaccatcgagagcatggcccgcttcctagaacagaggaaaagaggagaatatgcagaaatcacgcctgcggaggcaaaggacttgtacccgctatcttttgcgcaaaaaaggctttatgcccttcatcagcttgcggcggacagtacgggctatcatatgcccgcttgtctggaactgagcggcagactcaaccgtgatcgtctgcacgaagccttttcagcgctgttacaaaggcatgaagcgttacggacatcatttgttttacgaaacggggagccgatgcagcacgtacattcacatgtcgatctcgatctcacagagattcacatgccatccgggacacttcttcaagaggcgatggaaactttcgtcaaaccgtttgacgtggaaaaagcgccgcttttgagagtgactttagccaaagccactgaagaacgtcattttctgctgcttgatatgcatcatcttattgcagacggtgtgtcaatgagcgttctgatccaagaattgacggatttgtacagaggaaaagagctgcggccgttaaaacttcagtacaaagatttttccgtctggcagcatgagcggttcgccgctgaagaattcaaaagacatgagcggtattggctggatgcgatcggggaaaatattccccttcttgatctgccgctcgataaaaagcgcccgcagcttcctgatttcagcgggtccgttgttcgaacgcgcctacaaaaagaaacggcggagaatttgcgccggctcatggatgagacgggttcgacactgtatatgattcttttggcaggctactccttgttcctttctaaattgagcgggcaggaggacattgtcgtcggttcacctgcggccggcagaagccgcgctgagcttgatggggtcatcggcatgtttgtaaataccgtggcaatgagaagcaggccgaaaggggataaaacattccgcgcttatttagaagaggtgaaaatgctcgccctcggcgcagccgaacatcaggacttcccgtttgaagaacttgcccaaaagcttgatacacaccgggaagtcaatcgcaatccgctgtttgatgccatgctcgttttgcaaaacagtgatgatttcaaagtgaaccttccgggcttatccgtttcttcacatgcagtgaaacatgacatttcaaaattcgacttgacgcttcatgccgaggaacggccggacggctcactggattttcattttgaatacagtaccgcgttgtttgaaaaaggtacgatcgaacggtgggccggtcattttaaagagcttttaggacaaatcgcatcggatgatgagcggaagctgtctgacattcatttgctggacacaaatgagcggcagatgcttcttcaagcggaaaatcaaacagctgagtatccgaggcatgagacgatcgtcagtttatttgaggcacaggcggaaaaaatgccggatcaaattgcagccgttatgtccgatgagcgtctcacctaccgcgagctcaatgaaaaggcggatcgaatcgccgatatgctgtcggaaaacggcatccgctccggacagattgtcggaattatgaccgaacgatctcctgaaatgctgatcgggattttcggtattttaaaagcgggaggagcttatctgccgattgatcctgactatcctgacgagcggatttcatttatgctgactgacagcggcgcgcgtgttctgttgacgcaatcgggtcttgggatatccggaatggacgggctgccggttttatacatcgataagcctgaatccgtttcagcagacagaacgaaagaaatgataacgcctgaacagccggcttacgtgatttacacatcgggcacaaccggaaaaccgaaaggcgttatgacggagcaccgcaatgtcatcagccttatcacacataaaggactgccgtttgatttcggcactggagacgtctggaccctgttccactcctattgctttgatttttctgtctgggaaatattcggcgcgctcttatacggcggaaaggtagttatcgtgccgaaagaaactgcccgtgatccgcatttgtaccggcagctgctgcaaagtgaaggcgtaacggtgctgaaccaaacgccgacggctttttccggactcattcatgaagaagccgggcatgcggacaagctgaagcttcgatatgtcattttcggcggagaagcgctccagcccggcatgctgaaaagctggaaagagaagtacccggagacagagcttgttaatatgtacggcattacggaaaccacggttcacgtcacatgcaaaaaactgaatatggatgatattgagagaaataaaagcaatatcggcagaccgctggaaaccctccatgcttttgtcatggacgcctatatgaatccgcagccgatcggaattccaggtgagctttatatcggcggggaaggcgtcgcgaggggatatgtaaacagggatgatttaaccgcctcccggttcatcacgaatccgcacattaccggcatgcggctctaccggacgggcgatattgccaaaagactctcaaatggcgagctggaatatgtcgggcggaaagatgcgcaagtaaaagtcagaggccacagaattgagctgggagaaataaaatcagcgctgcaggagctttccttcgtgaaagaggccgccgtgatcacacgtgctgatcagcacggtcagcactccatttacgcatacgcggtcttacacgggaatgaaaaaataaaagaagcagaggttcaggcctctctcagagcttttctgccggaatatatgattcccgcccgcttgatagagcttgatgaactgcctttgacggcgaatgggaagctggacgagaaggcgctcccgcagcctgaattaaatgaaagccttggagatgatatcagcctgagaaatgaaactgaagaaatgatggctgacatctgggaagaactcttaggtgttgaaggactcggccccaatgctcatttcttccatctcggcggggattcgattaaagcgctgcaagtatgtgcgaggctgaaacagcagggctatgaaacgaccgtccgcgagctgttcgagcatcagacactgggagaagtctcgatgcggctccggaaagtccgccgcgtgattgatcaggctcccgtcacgggagacgtgccgctgacgccgatccagcactggttcttttcgcaatcattgccgcatgatcattttaatcagtccgttatgctcagcagtgcggacaggatcaatgaatctgctatgagaaaagcgctggcacagctcgcggttcatcatgacgcattacggatggtatgcggcacgcaaaacggatcagtgattcaatataacagagcggataacctttctgaagaagaactctttacatttgaaacgcatgacgtgagagggaaagggttattacaagaggaacacgccgcaattgaacaggcggccgcccgcattcaaacttccattcggctggagacgggtccgctcgtagctgtcggtttatttcacgctaatgatggcgatcatctgctgctttccattcatcaccttgtcattgacggagtgtcatggcggattttatttgaagatctcaccgcgtgctacaggcaggcgctcgaaggaaaagaagccgcgcttccggcaaaaaccgattcctatcagacttacgcgaagcaaatctctgattatgcaaaaagccgccggctgttacaggaagcagactactggtccgaaagagaaaaagcggcggtcaaaccgcttccgaaagatgcccgcatctcttccaatcttctgaaagatacagatgtgatgaccgttacattgacaaaacaggagaccgagcagctgttaacggaagcgaacagagcatacacaacagagacgggcgaattattgcttgccgcgttaagcctagcgctgaacagatggaccggaaacgagacattcaaaatcagcatggaaggccacggaagggaagagcacctggagcatcttgatatcagcagaaccatcggctggtttacgtcaatttatccggtattggttgacgcaagttttcaagatcagcctgatgacggcgagcgtctcggctatcacattaagcggacaaaagacatgatgcgccgcataccgcataaaggagcgggatacggggtgctgaaatatataagcaaactctggggagagactgaatctgattctcctgaaatcagttttaactatctgggacagtttgaccgggaaatccgttccagcggcttcggtgtttctcccgtaaaagcgggaaatgaagtcagcccagactgggaacgtccgtacacacttgatatcagcggctccgtatcgtcggaatgtctcagcatgcatgtcgtgtacaaccgttttcagtatcaaaaagaaacgattgaagttttgacgggatattttcatacctttctcaagcagattatcacgcattgcacaggcaaagaggagcgtgaatggagcgccgctgatttcagtgacgaggagttaacgctggaagatctgagtgacattatgggagccgtcaacaaactatagaaaaggagtggcgcaatggggcagcaaccggaaatacaagatatatatcctttgtcttttatgcaggagggcatgctttttcattctctgttggatcatgactcaagagcctacttcgaacaagcggtgtttacgatcagcggacagcttgaccgggaacggttccaaaaaagtatagacactgtttttgaacgatacgatattttccgtacgacatttattcacaagaatgtggcaaagccccgccaagtcgtgttgaaaaacaggccgagccgcgttcagtttcatgatatttctcatttggacgagaaggcacaagacaaatatgccgaccggtttagaaaagaagataaagataaaggctttgatttgcaatcagaccctctcatgagagtctccattttgaaaaaagcgcctgaacgctatgtttgtatatggagccatcatcatattgtcatggatggctggtgcttcggaattgtcatgaaggaatttctgatgatctatcaatctctcggagacgaacggcttccgttcctcgagcccgttcagccatatgggaagtatattaaatggctcatgaagcaggatcgtaaagaagccgagattttttggaaaacgagacttgccgatcttgagcaaacggcgtctcttccgaaaaaatccgcggaaccaaacggcgaacttgagcaggcggttttcaccatttctgaagagcagacaaatgagctgaagaacattgcggcaagggcgggagcaacgctgaatacagtgttccaggcactgtggggcattttgctgcagcgtgtcagccgctgtgatgatgccgttttcggttctgtcgtttccggccggccgtcggatctcgcaggcgtggaaaaaatggtgggactgtttatcaatacgattcccgtacgggtgaaaagcggttcattttcttttctggagcttgtcaggcatttgcagcaggagacgctgcaagcagaagcgtacagctattatccgctgtatgacattcaggcgcaaagccctctgaagcaagcgctgtttgaccacattatcgtgtttgaaaatgtgccggcccagcgtgaaattgaaaatgtgagtcaggccggttcatttgattttgcggtagaggattttacgatggaagaagtcacaaactacggatgcagcataaaggtgattccgggcaattctctttatatccgcttaaaatttgataccggtatatacgacgatgtttttatgaagaatatcgaaacatttttacggcatatggtgaactcagtcatttccgaccctgaaatcggcgcttccgagatcgcattgctggatgcgtgtgaagccagaagtatgatggatgcatttaaccatacagaagcggttgaaccgccggctccgacgcttcacgggctgtttgcccgccgcgccgcgctttcgccgcatcgtccggcgctccgttttccgggcggtatgctgacgtacgctgagcttgaccagtacacggacaggctcgccgtccggctccgacaaaaaggcgtccgcaaagaaagcatggtcggcgtactcgctgaacgctcgccggagatggcggtttcagtgcttgccgtgttaaaagcgggcggcgcctacgtgccgcttgacccggagtatcctgaggacaggctgcgatatatgcttgaggacagcggcgcttgtctcctgcttgcacagccggggttatccgtttccggtttttccggtgaaacgctagaagtgtctctttcttctctgacaaatgagacggagacaggggctgtctctgaagaagcggatgctgattcgctcgcttatatcatttatacgtccggttcgacgggaacaccgaagggagtggctgttgaacaccgtcaagccgccgcctttttatcagggatgcaagggcagtttccgttaacggaagaggatattatcgtgctgaaatcatccttttcattcgacgcctccatctggcaattgttttggtggacgatgtccggcgcctccgtgtatctgcttccggccggctgggagaaagatcctgtgcggatgattgaagcgtttgcctcagaaaaggtgacgaccgcgcattttattccggcgatggtcaacagctttttagacgcgctggaaacagagcctgcggaaacaagaacacgcctcggcagaacactgacacgcgtgttcgccggaggggaagctctttccccgcttacggctgcccggtttgccgatcttctgccggagaccatgcttattcacggctatggaccgacggaagcgacggttgatgcggcgttttacgtctgtgaccgaaaacgggacagcggacggacaaggcttccgatcggaaaacccgttccgggtgcccgtctgtatgtattagatagcggaggaaccatccagcctgcgggcgtggcaggagagctgtacatcgcggggaccggcgtggcccggggctatctgaaccgccctgagctgacggaggagcgctttgtcgttgatccgttttatccgggagaacgcatgtatcagacgggcgatatcgcacgctggacagaagacggccttgtcgaatggctcggtcgttcagacggacaggtgaaagtccgcggctaccggattgaaccgggggaaatcgaagcggcgatccggcacatcgacggcattcgtgaggcggcggtcaccgcccggaccgaacacggcgaaaccgcgctttacgcctatattgaaggacgaaaaagcgatgacgtgcgggcggagcttgcgacacgccttccggcctacatgatgccggctcagtttatagagatgagcgaatggccggtcacgccaagcggaaagcttgaccgccgcgcgctgccggctcccggcggatcggcagacagacaggcgtacactgccccgcggaacgtcacggaaatgaagctttgcgccctttgggaagaggtgctgaaaaacggccccgtcggcatccgggatcacttttttgagcggggcggccattcgttaaaagcgacggctctcgtctcccgcatcgccaaagagttcggtgttcaggtgccgttacaggacatcttcgcccggccgacggtggaagagctcgcttcggttattcaggacttggaagaaagctcgtatgaagcgattcagcctgcgcaaacacaagatacctacccggtgtcttcagcgcagaaacggatgtatgtgctccaacagcttgaagacggcggtgtcggctacaatatgccggctgtgctggaactgacgggcccgcttgaccgtgtccggctggaggagacgttccggcagcttgtggagcggcacgagtcgctcagaacgtcctttgaaacggggcctgacggcgaaccggtgcagcgcatccatgacagcgtgccgtttcagctcgatgaggccgagtcagctgacgcattcgtccggccgttttgtctggaggaagcgccgctcttccgtgcggccctcgtgaaagaatcggaagaacaccatcttttattaacggatatgcatcatattatttctgacggtgtgtccgtcaacaccttgataaaagaattcggcgagctgtacgcaggccgttcgcttgcgccgatgcgccttcaatataaagactatgccgtctggcagcggtcgtttcaggagaaagaaggatatcagaagcaggaagcctattggctgaagcggcttgaaggagagcttccggtgcttgaacttccggctgacaagccccgtccggcggtcagaagctttgcgggcggcagcgtatcgtgcacgcttgacgctgacacggcatccggccttcaccgcatcgcccgggatcacggctccactttgtatatggtgcttctcgccgcgtacaatacgctgctcgcgcgattgagcgggcaggaagacatcatcgtcggatcgccgattgccgggcgcccgcacaaagaccttgaaccgattctcggggtgttcgtcaacacgctggccatcagaacggagccgaaaggagacaaacggcttaccgattatttggcggaagtccgccaggcggcgcttgaggcgtatgaacatcaggactacccgtttgaagagcttgtggagcggctcggcgtgcagcgggacatgagccgtaatccgctgtttgacgtgatgtttgtgctccaaaatatggagcgtgaatccctgaatttaaatgagctgcatttgactcaagccgcggatgcaggtcataaaaccgcaaagtttgatgccacgctttacgcggcagaagggtctgacggttccatcagctttgattttgaattcaatacagatatctatcaaaaacagacaatcgaaaaatggctttcttattttacccgtattcttacaaaagtaattgaagaccaaacaataccgcttggtgacattcacgtactggatgatgctgaaacaaatcgcgttatttatcagtttaatcagacgaaaagcgattacccaagacacgaaaccatcagccgtttatttgagcggcaggctgaagaaacccccgatgcccgggcagttgtatatgatggacaaatcttgacataccgtgagctgaacgaacgggctaatagaatagcggcggctctccgatcaaatggcgtcggtccggaaagtgttgtcgccttattaaccggacgtacaacagagcttgcttccggaatcctcggaatattaaaagcgggaggcgcctacttgcctatcggtgacgatgtgcctcgggaacgggctgaatggatgcttaaagactgtaaagctgatattcttctccaatctgataaacttgacggtctgccgctttccggaaaacgtttattcatagaggatattcaaacaaaggccggcttaagttcggaaaatcccgaaccgctcggcggacctgaatcattggcctacatgatttatacatccgggtcaacaggtgcgccaaaaggcgtcatgattgaacagcgaagtgtgatccgtcttgtgaaaaacagcaattatattgattttacgccgaaagacagactgttgtttacttcatcattaggatttgatgtaacgacatttgaaatattcggtccgcttttaaacggtgcttctttatatgtaagtgaccaggaaacctatctcgactctgatgttctggaaacatttatacagcaaaacggcattacgacactgtggctgacatcgtctttgttcaatcatctatcagaacaaaatgaacacgtgttttccggattatcccgattgattatcggcggggaagcactgtccccaagtcatgtaaaccgggttcggaaaacgctgccgcatctttcaatatggaatggatacggaccgactgaaaacacgacgttctcgacttgctttttgattgaacaatcatacgatcattcaatcccgatcggccgccctgtcggaaattcaactgcatatatcataaacagcaggggaacaccgcagccgatcggcgtcatcggtgaattatgcacaggcggagacggtgtggcaagaggatatttcggccgccctgagctgacggaagaaaaatttgtccctaatccttttgttcccggagaacggatgtaccgcaccggggatttagcccgctggctgccggacggaacgattgaatatgccggacggatggatgatcaagtgaaaatccgcggttatcgggtcgagctgggagagattgaagccgcactaaggagcctggacggcgtgaaagaagctgccgtgtcagtcagaaccgggcagtccggcaataaagaactgatcgcatatatgagtctgcaggcggacatggatacagaaaaagtgcgttcttcactttctaagcaactgccgaattacatggtcccggcctatatgatggaacttgagaagctgccgcttacgccgaacggtaaattggatcggaaaaatctgcccgaaccggagctcgcgcttcaaaccgcgtacacagctccccgcaatgagcttgaagaacagctttccgtgatctggcaggaagtgctcggcacaaaacaagtcgggattgaggattcattttttgagttgggcggcgattcaatcaaagcgctccaagttgccgcacggctcggacgctatgggtggaaaatgacggcaagtgacttattccggcatccgtccattaaggaactcgcgcctcttatccggaaagcggaaagagtcatcgatcagcaaccggtggaaggagacataccttggacacccgttcagcactggtttttatcacagcggatggaaaacagaaatcatttcaatcagtccgtcatgatgttcagctctgacgcattgcataaacagccgctcaaacaagccttggagcatcttgtcattcatcatgatgcactccggatcaccgtcagtgcagaaaacgaaagtatcagacaaatcaatcacggtattcaaaaagatgaactgtacagcttggacatttgggatctgtctgagacagatacttgggaaagagaaatagaagatgaagtggctgcgctccaacagcggatggatattgaaaaaggaccgttattaaaagccggctggttcaaaacccggtcaggggattatttattcatcaccgtacatcacctggcggttgacggagtgtcatggcgtattctgctggaggatttatctgccgcttacacacaagccgtaaaaggtcagccggtccagcttccgccaaagaccgattcgtttaagcaatacgccgtaaggctttcagaatacgcaaaaagcagcaagctgatgcgtgaagaagaatattggcgttttattgaagaagaaacagccgccggacttccttatgaaaaaccgcagtatcagacgggagccgacagcattcggcaaacggtaagctttacgcttacagaagaagaaacgtccgttttgcttcagcaggtcaaccgggcctaccataccgatacgcaagatgttcttctgactgccgcagctttggctttacgggactggacagggggcggcagactgcgcatcgcgatggaagggcacgggagagagcacatcatgccggagctcgacatcagccgcaccgtaggctggtttacctccatgtacccggtgctcattgacttgaacacagcaggcgctgagcttggaacggctgtaaaaacggtcaaagacacactcggaagaataccggataaaggaataggctacggcattttaaaatacatgacaccgcctgaacaaaaaacaatccgcttcagacaagcgcctgaaatcagttttaactatttagggcaattcaatgatacagaagatcagcccacattcagtttatccggtcttgcgagcgggcacgacatcacgccgacatggcagcgggaacaagcggtggaaatgagcgcgatggccgctcaacataaactgcacttcagtttgagctatccgccgagccgcttccgcaaagaaacgatggaacagctgctgcaaaccttacagcaatatttgcgtgatattatggcgcactgcacaggcaaagaggaagcagaaaaaaccgttagtgattttagcagcaaaacgttaacatctgatgatttggacagcatagcgagttttgtcgaggaactgtagaaaaaggcgacggggagattataacatgacaaaaaagaatgcaattcaggatatttatccgctgtcttatatgcaggaaggaatgctttttcattccctcctgcaaaaggaatcacaggcttacgccgagcaggcctccttttcaataacggggaaggttgacacccgcgtgtttgaagagagcgttcatgcccttttcgaaagacatgatattttcagaacgatctttatcagccagaacgtgtcagtgccgcagcaggtcgtattaaaagagcggaacgtcagcatcattgaggaaaatctcaccaatttaaacaaggctgatcaaatcaagcatattgaagaagccaaacgaagagaccgaaagaaaggatttcacctgcaaaaagacatgctgatgcgggtgacgctgcttcaaaccggtgaatgtgaatatacgtgcatatggagttttcatcacattattatggatggctggtgtctcggaatcgtgctgaaagagttcttccagatatacgcctcgcggctccgccggacaccgttaacgcttgagcccgctgtgccgtacgggacctacatcaagtggctgatggagcaagataaagaaaaagccgcttcgtactgggagcgataccttgaaggctttgagcagcagactgttctgccgaagcagaaaaaagccggcgaaagcagccaagaggaagtgacgttttccttttcaaaagaggacacagctaagctgaaagatctggccgtgaaagaagaggtcacgctgagcaccatttttcacacgctctggggcattttgcttcaggcgtataaccagacagaagatgcggtttttggttctgttatttccggaaggccgtctgaaatcaaaggcatcgagcgaatgatcggcctgttcattaataccgtgcctgtccggatcagcggggcggacattccgtttcaaaagctgatcaaaaacgtgcaaaaggacgctttgaaaggacaggcatacagctatcatccgctttatgatatacaggcgaattcacaggtaaaacaaggcttaattgaccatattctcgtctttgagaattatccggttgaacaggagcttgatgtactgaacagcaagggggacacgaaagacctttttcacatccatgatttcagcatggaagacgaaaccaattacagtttttacctgatggtggcgccgggtgacgagattcacttgaaaatgagatacgattcaagcatgtatgaccgccaatttatcgaaaatatcaaaggtcatttgacacatatcgtttcccagattctcgacaaacctgatatcacgccggataagcttgtaatcatcactcctgaggaaaaagagcagctgcttgcgccgatttctgaagagactgaaaagcctgagtatgacacgattcatgcgatgtttgaacggcaggccgcacaaacgccggatcaaatcgcgatccggtatgaaggcgggtcagtgacgtacaaagagctgaatgaatcggctaataagctggcccgtctgctgcaaaaacgcggattaaagcgggaggagccggtaggcgtcatgctcggccgttctccttctttagcggcggccgttctcggtattttaaaagcgggcggcgcctttgttccgatagatccgggcagtccaaaggagcgtatccgatatgttattgaaaacagcggctgcatccatgttgtaacagagcggcatcagtcactccccgcggaacaaacgctgcaggttacatatatagaagaggccgggacggaagcggacggaagcaatgtgcaatccattaatacggcggacgacctcctttatatgatttatacatccggtacgacagggaaaccgaagggcgtgctgctcgaacataaaaatatggccaaccttctttctgaccaattgacgaacacaggcattgatttttgcacaaatgtgctgcagtacgcatctttggcgtttgacgtctgctatcaggagttattttcagtactcttgagcggcggcaccctttgtatcgtgcccgaatcaatcaaacgggatgtttctcagctgtattcgtttatcgatcagcacaaaacggaagtggtgtttttcccgactgcgtttgtcaagatgcttttcaatgaagaaggttatgcacagtcttttccccgctgtgtgaagcatgtcattacggccggggagcagctgactatctcacgtttgttcaggcagacgctccgtttacacggtatgcagctgcataatcattacggcccgtcagaaacccatgtggtttcaacgtatacgatttctgcgggagatgacatacctgaacatccgccgatcgggaaaccgatccatcataataagatgtatattctcagcaaaaacagacagcttcagcctctcggaattgcgggagaattgtatatttccggagcgaatacaggaagaggctatgtgaacaatccggcgctgaccgaagagaaatttttgccggatccgttcagaaagggcgccgtcatgtaccggaccggagatttggcaagactgcgtgcggacggccaaatggaatacatcggccggacagatgatcaagtgaagatcagagggtaccggattgaaccgaaagaaattgaaaccgttctggcaaatcatcatgccgtgaaagaagctgccgtgctgattcaaacgaatgagtcgggcgaaaatgaattatgcgcctactgcagcgtctcacaagcgactgatccttctcagctgcgaagtgatttggccaaagagctgcctgattatatgattccggtcaaatgggctttcattgacgcgattccgctcactgcgaacggtaaagtcgatcagcgggcccttccggaagcttcggcgtacgcagcgggccgtcgatatacagctccccggaatgtgaccgagctgaagcttacccgcatatgggaagaagtgcttcaaaccggcccgatcggcgttcacgatcactttttcgagcttggcggccattcattaaaggcgacggcactcgttgcaaaaatagctaaagagtgcagcgtgcaaatcccgctgagtgatgtcttcagctatccgactgtagaagaactcgccaaaatcatcggtgaagcagaagagaatccgttcgcatccatagaaaagacagaagcaaaaggaacttatcctgtctcatccgctcaaaaacggatgtatgtccttcaccagcttgaaaatggcggtgtcagctataacattccagccgttttagaggtgaaggggccgtttgaccgagacaggatggaagccgtgttcaaggagctgatccggcggcatgaaccgctcagaacgtcctttgaagaaaaaaacggccggcctgtgcagaggattcatgacgaagtgccgtttgcatttacaaaagaacaatcagccgaagcgtttatccggccgttcgatctcggcaaagcgcctcttttccgggcgggatttgtccaaatagaaaaagaccggcatctgcttttagctgacatgcatcatattatttcagacggcgtatccgtcaatcttttgatacgtgaattcagtgagctgtatgctgagagaagtctgccgccgttacggattcaatacaaagattatgccgtctggcagcaatcatttaaggcgggcgccgcatatcggaaacaagaggagtactggctgaaccggcttgccggggagattcccgtgcttgaattgccggctgataagccgcgtcccccggtgcggagcttttccggtgaccgggtgtcatttgtcatcagcgaaaaacatacagcgcagttgaaaaagctggcgaaagaaaacaaatgcacactttatatgacgctgctcggtgtgtacacggttctgttagcccgtttaagcggacaggaagatatgattgtcgggtctccgattgcaggaaggcctcatgccgaccttgacgccgttctgggcatgtttgtcaatacgctcgctttcaggacgcgtcccgacggaagcatgacgttcaaagaatatttaaaggaaattcgccaaacagcgcttgaggcttacgagcatcaggattacccgttagaagagctcgtcgataagctcggtgtgccgcgggacatgtcccgaaatccgctgtttgacacaacatttgcgctgcaaaatatggaacagcagaagcttagggcagccggacttgaactgcagccggcagacgtcagcctgccgatttctaaatttgacttatcgctgtacatctccgaaaacgccggtgaattgtactgccagtttgaatacagcactgatttgtttgagagaaaaacgattcaaaaatgggcggaatttttcacgacacttgctgaaaacgccgcagctgatccgggtttggaattagacgatatttctgttttgtcagaaaaagaagaagtgtctctgcttcaaaatttcagccccttgcagaaaacagcgtttccgcttcatcagccccttcatgagctgctggaacaacaggcggaaaaaacgccggaccgtccggcgattttaactgatgagatttcgattacgtatcaggaactgaacgaaagagcgaatgagcttgcgcaccggctgatcaaacgggggataaggctggaggataaaactgccattatgggccggcgttctcctgacatgctgatcggcatttacgctgtcttaaaagcaggcggtgcatatctgccgattgatccggattacccggaagagcggattcgctttttactgaaagacagcggcgtgaaattcttactggcagaaccagaacttttcgcaccagatctttttaagggagaaacgatctctctgaaaagcggacaaacaggaaacccggaagctgcggccaaccccaatgttccggtaaagcctgattcattggcttatatcatctatacatccggttctacgggacgcccaaaaggcgtgcaggttgaacatcagtcagccgtaaactttttatactcgctgcaagcgcgttatggattaaaggattccgacaccattttgcataaaacatcatactctttcgatgcttcgatttgggagctgttttggtggccgatcgcgggagcttctgtttttctccttccgcaaggcggcgagaaagaccctgaaatgatactgaacgcattggagaaaaaccgcatcacggcagctcattttgtgccatccatgcttcatgctttcttggaatatataaattccagaaaacagccgatcaaaaagacctgcttaaaaagggtttttgccgggggcgaacaattgggcccgcacttggtttcccgtttttatgaccttctgccgggaacggaattgacaaattcctacggtccgacggaagcgacggtagaagcggcgtacttcgatttgccgcaaggaaaggaatttcacaatgttccgatcggcagttccggacataacatgcggctgtatattttaaatcaaaagaaacagcttctgccgccgggctgtatcggagagctgtatatcgcagggaccggcgtggcccggggctatctgaaccgccctgagctgacggaggagcgctttgtcgttgatccgttttatccgggagaacgcatgtatcagacgggcgatatcgcacgctggacagaagacggccttgtcgaatggctcgggcgttcagacggacaggtgaaagtccgcggctaccggattgaaccgggggaaatcgaagcggcgatccggcgcatcgacggcattcgtgaggcggcggtcaccgcccggaccgaacacggcgaaaccgcgctttacgcctatatcgaaggacgaaaaagcgatgacgtgcgggcagagcttgcggcacgccttccggcctacatgatgccggctcagtttatagagatgagcgaatggccggtcacgccgagcggaaagcttgaccgccgcgcgctgccggctcccggcggagcggcagacagacaggcgtacaccgccccgcggaacgtcacggaaatgaagctttgcgccctttgggaagaggtgctgaaaaacggccccgtcggcatccgggatcacttttttgagcggggcggccattcgttaaaagcgacggctctcgtctcccgcatcgccaaagagttcggtgttcaggtgccgttacaggacatcttcgcccggccgacggtggaagagctcgcttcggttattcaggacttggaagagagcccgtatgaagcgattcagcctgcgaaaaaacaggacacctacccggtgtcttcagcgcagaaacggatgtatgtgctccaacagcttgaagacggcggtgtcggctacaatatgccggctgtgctggaactgacgggcacgcttgaccgtgtccggctggaggagacgttccgggagcttgtggagcggcacgagtcgctcagaacgtcctttgaaacggggcctgacggcgaaccggtgcagcgcatccatgacagcgtaccgtttcagctcgatgaggccgagtcagctgacgcattcgtccggccgttttgtctggaagaagcgccgctcttccgtgcggctctcgtgaaagaatcggatgaacgccatcttttattaacggatatgcatcatataatttctgacggtgtgtccgtcaacaccttgattaaagaattcggcgagctgtacgcaggccgttcgcttgcgccgatgcgccttcaatataaagactatgccgtctggcagcggtcgtttcaggagaaagaagggtaccagaagcaggaagcctattggctgaagcgacttgaaggagagcttccggtgcttgagcttccggctgacaagccccgtccggcggtcagaagctttgcgggcgggaaagtatcgtgcacgcttgacgctgaaacggcatccggccttcaccgcatcgcccgggatcacggctccactttgtatatggtgcttctcgccgcgtacaatacgttactcgcgagattgagcgggcaggaagacatcatcgtcggatcgccgattgccgggcgcccgcacaaagaccttgaaccgattctcggcatgttcgtcaacacgcttgccatcagaacggagccgaaaggagacaaacggtttaccgattatttggcggaagtccgccaggcggcgcttgaggcgtatgagcatcaggactacccgtttgaagagcttgtggaacggctcggcgtgcagcgggacatgagccgtaatccgctatttgatgccatgcttgtcgttcagaatatggaacatgaggaattgctgttggacggtttgcatattcagcctgcggacgtgtcccgtccggtttccaaatttgatgtcactttgcaggcttctgaaggcgggggacagattcattttctgtttgaatatgcggcgtctttattccggaaagaaacgatgcagcgctgggcttcccactttatgacgatgcttgaacacattgtccgtgaaccggaaacttctatacaagcgatcagcatgctgactgctgcggaacgggaccgaattctttcggactttaacggcatgacggataaacagctgcctgaaaaaacagttcatgaactgttcatcactcaggcgcgaaaaacaccggatgcggcagcccttatcagcggggaaacgttggtcacatataaagaattagatgaatggtcgaataaaatcgccagagctctgcaaaaacggcagatcggaccgaatgccgccgtcggcattgtgataccaagatcaccggaacaagtcgccgcagtcttcggggtttggaaagccgggggcgcctacgttccgatagatcctgaatacccggaggaacgcaagcaatatatcatttcagacagcggcacagcgcttctccttaccgtacacggcgcaatagatcaagtgcctgatcattttaaaggtgaagtgctcgcactggaggatatccaagaacaagacgcatcaccggttcagccattatcagcaccggaagatttggcttacatcatttacacgtccgggacgacaggcaggccgaaaggggttatggtcgaacatcgttccgtcagccaaacccttcaatggcgaagcggattttatgatctgaatgagaaagatacggttcttcagcttttttcattttcatttgacggttttgtaacaagtatgttcacaccgctgatttccggtgcgaaagcggccgttttagccgaagatgaagcaagagatattcttgccattaaacactatcttgcatcttaccgcatcactcatatgatcattgttcccgtactgtaccgtacactgcttgacgtactggagccgggggatgcagagtctctcagaattgtcacattagctggagaagctgtcgaccaaaacattatcagccgcagtttatcagtttgtcctcacacggagcttgccaatgagtacggcccgacggaaaacagcgtcgccactacagcggcaagacatatagaacaaagtgagaacattacgatcggccggacgattgagcattcacacgtttatattttaaacggggatcacccgcagccgatcggtgtaacgggagaactttgcatttcgggttccggccttgcaagagggtaccgcaatcttcctaagcaaacggcccaagcctttgtccaagacccgttccagaagaaccggcgcatgtaccgcacaggcgatctggcaaaatggctgccggacggcacgctgcaatatatcggccgaatggacgagcaagtcaaaatcagaggctaccgggtggaactgaaagaaattgaatcggccttaacaggcataaaaggtgtcaaagaagcagccgtcaccgctcataccgcatcagcaggccaaacggaactatgcgcttatatcgtgacagaagaaggaacagaaagtgaaaccgtgcagcaggcgctcagaaatgaaatgcccgcttatatggtgccggcgttctttgaaacacttgaagccctgcctgtcacaccgaacgggaagcttgaccgccgcgcgcttcctgagccgcggaaaaaagcgcacaccggacgggcatttacggagcctgaaagcgacatggaaaaagagctttccgcgatttggagcgaagtgctcggaactgaaaacattgccgcggatcaatcattttttgaactgggcggcgattccatcaaagccctgcaagtatcagcccgattacatcaggcaggaaaacagatcgccgtaaaagatattttcagccggccgacaattagagagctggcgccttatgtccgtacagagcggcagccggtcagccaagctcctgcagaaggagaagtgaagtggtcgccggttcacaaatggttcttcacacaagacatgaaggaagcaaatcattttaaccagtccgtcatgctgacgagaacaaattcaatagatgaagaggctctcaggaaaacgttaaaagccattaccgttcatcatgatgctttgcgccttgtctgcaaaaaagacgaagagaaaggtcttctcctcttcaacagaccggctgacctcgcagatgagcagctttacaacctgaccatattagaaacggaaggcgatgagcatgagaaggaacgttttataaaacgccgcgtcgcagagcttcagagaaacatggatttggagaacgggccgctggtacaggcgggactgttccgctctgaagcagaagattacttgtttctgacggtccatcatctcgctgtcgacgggatatcatggcggattttattggaggacttggcttctgcttatgagcaggccgcctctggacaggaaatcaaactccctccgaaaaccatgtcattcaaaacatatacggagcagctggccgattatgccgaaagcaaacagcttcttcagcaggcggagtattggcgggagattgaacactatgaaacagaaagtcttccttacgagcaggcagatctatctcaaactcctgcaaaaaaacggaacacggtatccttcactctgacagaaagtgaaacggacgccctgttgaaagatgtgcacagcgcctacaatacggatacgcaagatgtgctgttggcttccgccgtgcttgcccttcaaaagtggtcgccgcagcacgctttgaaaatcgcccttgaaggacacggacgccaatcggagcaggcaggtgcggacatcagcaggacagtggggtggttcacttccatttacccggtgcttgtccggagcggagtttatgaacctcttgaagaatatgaaattcgcacattgaaaaccgttaaagacacattgcggcgcattccggataaagggaacggatacggcgtcctcaaatatttaacaccgccgaagcttgccgggatgactttcgggaaagcaccggagatcagctttaattatctcggacaattcgatgcgcccggcgggagtccggcagaaacggaacagcctgacgcgtttcagttttctcctttgggaggcggagatgatgtcacagatacatggaaacgggagcagtcacttgaaatcagcgctattgcggcaaaaggccggatgaccgtcagcatttcctatgaaacggagcgcttccggcaagatacgatcgaacggctgtccgaaagctgccggtattatctcctgaaactgtcggaacactgcctcagcaaaaccgatacggagaagaccgtcagtgactttgatgatcgggagctgactgaggaagccttgcaggatattgccgacttactcagcttccactaaaccgagcgggaggaacacatggacaaaacaaaaaacatccaaaatatttatcccctcagccgaatgcaggaaggaatgctttttcattcctttctgcaaaaggagggggctgcatatatcgagcaatccgtcttcaccataaaaggccggcttcgtccggaattgtttgagcaaagcgtacagtctgtcatcagccgtcacgatattttcagaacggtttttttacctcatgtcgctcagctgaacggcccccgccaagtcgtgctgcgtgagcgggaattccggctgcaccgcgaagatcttacacatttggatgaagcggaacagagcgcctacttacagcgatttaaggaacgtgaccgcttaaaaggctttgacttgcaaaaggatatgctgatgcgtgtgtctttgtttaaaacggctgaggaaaaatatgtatgcgtctggagccaccatcacatccttatggacggctggtgcctcggcatcgtccttcaggaattcatgcatatgtaccgggcgattgaatcaggctcacccgtcacactggcgcccgcaaagccttacagcacgtatattacatggctgactgatcaggacaaagacgcggcttctgagtattggaaaggatatttagcaagctgcgagacaccctcaggactcccgaaaatatcggcccgtccccagggaaaaggctaccgtaagaaagagctcctgttttctttagatcaaaatctgacagacaggctgaaaaccatcgccaaagaagagggcgctacgctcgcggttcttatgcagactgtatggggcctgatgctgcagcgctacaaccggacggacgatgccgtattcggcgccgtcgtatcagggcggccttccgtcattgacggcgtggaaagcatgatcgggctgtttatcaatactgtgccggtacgcattaaaacgggtgacgaaagctttagagaactgctgggccgctgccagaaagaaatgcttgattcagaggcgttcagttatcatccgcttgctgacatccaatctcagactgagctgaaacaggatttaatcgaccatatcatcgtgtttgaaaattatccgattcagcagcagatgagagacgcggaaaaggaatcggatgcaccgttccggatcgggaatgtcaatgtttcggaacaatcgggctacgattttaacctcatcatagcgcccggcgatgagctgatcatcaaattcagctacaatgcgaacgtttatgacgaagtatggatagagagcgtaaaaggacacttggaagaagcgctgcgcggcgccgccttcaatcccgatgttcccgctgatcggcttccgatgctcggacaaaaggaaaaatcaagaataatcggcgaatttaatgacacgaaaacaacgtatgaaagagacgaaagcatcatcagcctgttcagccgacaggtgaagaaaaccccggaccatcaggcgcttcacgccggcgggctgacgatgacgtaccgggagctcgatgaacggtcaactgcgttcgcccgcatcctgctggaaaacggtttggcgccaaaaggaattgccgggattcttgccgaacgctcaccggaatttatcatcgctgttctcgctgtattgaaagcgggagggacgtaccttccgctcgatgcagaactgccatccgacaggatcgccgaaatgctcactgagagcggagcacagctgttaacggtacaaaaagggattgagactgacattgacttttctcacatcatctctatcccggctgcagctgaaaaacaaacagctgatgagggaaaactgaataccgttacgtcacctgatgaccttgcctatattatgtatacatccggttcaacaggaaaaccgaagggtgtgatgatttccaaccgcaacgtcgtatcgctcgtgtcaaacagcaattacacgtcagccggcacgacggaccgtctcattctgacaggatccatcggttttgacgcagtgacgtttgaaatcttcggagcgctattgaacggagcgtgcctccatgtggttgaccgcacgacaatgcttgcccctgagaggttcggcaattatctttcttccaacggtattacgattctgtttttgacgacggcgctttttaaccagtttgcccaggcggatccggagatgttttgcggattgcacaccttatatgtcggcggagaagcattgtccccggcgctcatcaataaggtcagacaccgctgtccgaatctcagcctttataacatatacggaccgacggaaaatacgacattttctaccttttacgaaatcaggcacgatttttctcagccgatcccaatcggaaaaccgatcagcaattcaaccgcgtatatcattgataaaaatggcggacttgcgccgatcggcgtgcctggtgagctttgtgtcggcggggacggggttgccaaaggctatttaaacaggcctgacttaacaagtgaagcatttgtcagccacccggttcatcctgaagaaaagatctacagaacaggggatttggcacactggctgcctgatggaagcatcggatacatcagccgtatcgaccgtcaattcaagattcgcgggaagcgtatcgagccggccgaaatcgaagcgcggctgactgaaattgatggaatcagggaagcggcagtcatcgtgtcagacgaaggacaagaagcaaccctttgtgcgtattatacaggcgcacatgctgaagaaagagccattcgatccctattggccaggtcgcttcccgactatatgattccgcagtatgtgatgaagcttgaccgtatgccgcttaccgcaaacggcaaagtggaccgccgcgggctgcctgcgccggaacggaaaaaagcttcatcaaaagccgttccgccacgaaactgggtagagcgtgagctgatcgacatttggacgccgatcctcggctgcggggagctgggcatacaggatgacttctttgagctgggcggccattctttgaaagcattgcaagtgattcatcagctgaagaccaggcagcagatggacgtcccgattgaaatgatatttgaatatccgacaattgaacaattggctgaaaagctgtattcaaacacactgtcagaagctgccgaacagcatatcagcagactgaatcagccgaaaggccgcaatcttttctgttttccgcctatctcaggtttcggcattttctttaaagatctggcggcggcattaaatggacgggctgctgtgtacggttttaactttattgaagaagacagcagaatggaacaatacattgataaaatgctggaaatccagccggaaggcccttatatcctcttcggatattcagcgggcggcaatacggcattcgaggctgcaaaagcgatggaaaagcgcggcttagaaatcagcgacgtcattatcgcagacgcgtacagaaagcttgacgcactgccgccgcagccaacaaacgcaacagccgaaaatgtcccggaagccgtcagggaagcggtcatcagaaaaacagagcgctatcaaacgtactgggcggaactgataaatgacggccaaattgcggcaaatctccattttattgaggccggcataaaggaagagcacagtgataagaccgagccgatgaaatgggaaggcgccacaacgggagtctaccaggaatatcagggcgagggagcccataaagatatgtttgagcccgagtttgcacacaaaaatgccgaggtcatactggacatcatcgcaaacagcggaagacgcttggcgcggaatctgtaacatccggcagaatgactgaagaagacaaagggcaagataggggaatcacactcagtttttttggaggctttgagatgacgaacctatcttggcttacgtatgtaatgattattcttgccagctaccggctgacccatttgatcgtatttgataagattacggaattcataagaaaaccctttataaagcaagaaaaaaccgtcgatcaaaacgggcgcgccgtccaaaaaaaagtcccttcctccgcattcggttatatgctgcaatgttattggtgtgcgggcgtctggtgcgccatattgatcggcatctgctatttggtctggccccgctatgcacatccggttattttcattttgtccattgccggagcgcaggccattcttgaaacatgcgtcggcgtcggaacgaaggtcattgacgtgctcgccgccataaaacataaaaagtcctgaagcgttttgattcgctttaggacttttttctttcccttttaggctgagaggagcaaagcaggctttctgattcaccgcccggaatgcttcggaataccgtaaagcagagagggggaaaaacatgaaaagctgccgttttagcatgatatggtttttggccgttgtactgacagccggcatctttacgttctcagcatccgcacaagcaagcggcactcagccggagagagaaatgcgagccgtatggatcgcgtctgtcaccaatatcgactggccctctaaaaaagggctgtcaccggaagagcaaaaaagagaatacagcaagctgctggatgacgttcagaagatgggaatgaacgccgttatcgtccaaattaagcctgcggctgatgctttttatccatcagattacgggccttggtcagagtatctgacaggaacccaaggcaaaaatcccggctacgatccgcttgcttttttagttgaagagacacataaacggaatcttgaatttcacgcttggttcaatccttaccggatcacgatgaatcacacaaatttgaatgcgctttcagatgatcatcccgcgcgttcccatccggactgggtcgctgcatacggaaaacagctgtactataatccgggcattccggaagtaagacaatttataacggatggaatcaaagaagtggtcagccgttatgacattgatgcggttcatatggatgattatttttatccttataaaattgccggacaggaattccccgatcaggcggaatacgaacggtacggaaaagctcactttgcatcgattgatgactggcgcagggataacgtcaaccggcttgtaaaagaaatcaacgaaaccatcaaacgagaaaaaccttatgtcaaattcggaatcagcccgttcggcgtatggagaaatgccgcagatgatccgacaggctccgaaacggccgccggggtgcggaactacgatgacttatatgctgatacaagagaatggatccaaaaaggatacattgattacatcgcaccgcaaatttactggagtatcggatttaaagcggcggcatatgacgtcttagcggattggtggggaaaagaagtgaacaatcggccggtgcatttatatatcgggcaggcagcttataaaatcaacaacaatactgatccggcctgggccgacccgggggaatacggaagacagattacgctaaacagaggatcagcatggataaaaggcagcatgcatttcagtttaaaggatttaaaccgtaatccgctcgatgtgaaaaaccgtttgatcaatgacatgtacagccggcccgcattaattcccgagatgccttggctcggacattccgctttaaaaaaaccggctgtcaaacgggcggagaagaacgcttcaggccatacactctatatcgaagatgcgaaatccaacggtaaaaaaacggcttattacgccatttaccgcgcagaaaagggaaagcagccttatttagtggatacagtcagaaaaacatcgtcacggacgcagacattttcagatactgttattcgggcggaagaagcatgcacctatatcgttacttccgttgacaggcttcaccatgagagccgtccctccgcaaaacggacgattaaatagccattattaataaaactgacagttgcggcactgtcagtttttttttgcggcggatgagtccgaatgttcagactttatttggatggaatgaataaagacccccattaataaaatgtagaaagcagcagaaggaggaaggttaatgaattttcaactgacaaaagaacagcagatggtgcgcgaaatggtcagagatttcgccaaaaatgaaattgccccgaaagcccatgaggttgatcaatcagccgtcttcccgatagacacatttaaaaaaataggcgaactcgggctgctcggaattccgtttccggaagaatacggcggggcgggcggtgacaccatttcatatgcagcagcggtcgaagaaatcggaaaagcctgcggcagcacggggctgagctacgcggcagccgtgtcactcggcgcaagcccattatactatttcggtactgaacagcaaaagcaagaacatcttgttccgcttgcttcgggaaaagcgctcggatcattcgggctgacagagccgaatgccggttcagatgccggcggcacccagacaaaagccgagaaaaagggcgatgactatgtgataaacggagaaaaatgctggatcacaaacgcaaattacgcccgcacggtcattgtcaccgccgttacgggaaagaactccgccggaaaaccgatcatttcagctctcatcgtcccgacagacacaccgggatttacgatcacaaatccgtacgacaagatgggtgtgagaggatcggatacggccgagcttgtgctggaggatgtcagggtgcctgccgataacctgctcggtgatcctgaaaaaggttttaaacaatttttatatacattagacggcgggcggatctcgattgcggcactggctgtcggtatcgctcaaggcgcactggaggcgtcgctgtcatatgcgaaggaacgcaagcagttcggcagtccgatatcgtcatttcaagccattcaatttaagctggccgatatggcgatggaaattgaccttgccagacaaatggtgcttaaagcggcatggctgaaggatcaaaacctgccatttacgaaagaagcggcattcgccaagctttatgcttcagaaatggccgtcagaacctgccttcaggccatccaaattcatggcggttccggttatatgaaggaatgcggtgtcgaacgtatgcttcgtgacgcaaagctgatggagattggagaaggaacatcagaaattcaaagaatggtcatcgcaagacagcttttgaagtgaaatgaaaacgtttactaagacagggatggaagggggcaggtcatatggctgaacttatccatttaacagccggaaagctgcttgagcggaccgcggagctttttccggatcatgaagcggttgtttaccctgagcgcggccttcgttatacgtatgccgagtttgaccggttatgccggcaaaccgcaaaagggctgatgaaactgggaattgaaaaaggagatcatgtggccatatgggcatccaacataccggaatggctcgcggcgcaatttgcaacggcgaaaatcggcgctgttctggtcaccattaatacaaattttcaaatcgcagaactcgattacctgctggcgcattcagacgtctcggccctgataatcatggattcctaccggcagacatcttatgttgagatggtgaataagctgattccggagctgaaaacttgtgagcacggcaggctgcgttcgaaacgttacccctttttacggacggtgttatatatcggtgataaaagtccgcccgggatgcaccgctgggattctttgctgaaggaaggcgaagctgtaacggatgcagcgcttgacggaaggatggacagcctgaaaaaggatgattgcattcatatgcaatatacatcaggtacgaccggatttccgaaaggcgtcatgctctcacattttaatatcgtaaataacgcggccaatatcgcagaatgcatgaagcttacttcaagtgaccgtttatgtattcccgtgccgtttttccactgcttcgggtgtgtgcttggcgtgctggcatgtgtttccgcgggtgcggcgatgattccgatcgaacagttttctccaccggccgttctgaaaacggtggagcaagaagcctgcacggctctgcacggtgtaccgacgatgtttatcgccctcctaaatgacagccgcttttctgaatatgatctttcccacgtccgaaccgggattatggcaggctcgccatgcccggcggaagtcatgagagaagtgatcggcaaaatggggatgaccggcattaccattgcctacggacagaccgaagcatcacctgtcattacgcagacaagaacggatgattcatttgaaagaagagtggaaacagcggggcgcgcgcttccccatatcgaagtcagaatcgttcggcccggaacatcccaagaagccgaccggggcgaacaaggagagctctgcacccgcggatatcatgtcatgaaaggttactataaaaatcaagaagcgaccgaagaagcgatagacaaggacggctggctgcataccggtgatttggctgtcatggacgaggacgggtactgcaaaatcacgggccgtctgaaagacatgctgatcaggggcggcgaaaatatctatccgcgcgagattgaggaaatgttatatcggcatcccgcagtggcagacgttcaggtcgtcggcgtgcctgatccgaaatacggagaagaggccgcggcgtgggtcaggctcaaagacggacaaaccgcttccgcagaagacatcagaaccttttgcaaagaacatatcgcccgctataaagtcccaggtatgttttgtttacagatgaatatccaatgacagcctcaggaaaaattcagaaattcaagctgcgggaaaaaacgattgaagagctcaagttaacttaatgaaaaaggagtgcttcacatttgtttaaaaaagtcctgattgccaacagaggagaaatcgccttaagaattatccgcacctgcaaacgtctcggcatcccctcggcagctgtgtattcagaagccgacagggacgcgctgcatgtaaaagcggctgatgaggcctatccgatcggtaaatcgagagtaaatgaaagctatttacatatcgacagaatcatagaagccgccaaatccgccggagcggacgccattcatccgggctacgggctgctgtcagaaaacagcctgttcgccgaacgctgccggaaggaacaaatcacatttatcggcccgcccggtgatatcatcgccaagatgggcagcaagatagaagcccgaaaaacgatgcaaaaagcaaaggtcccgatcgttcccggtgtttcagagccattgcccgatgttcactccgccttagccgaagcccgtgccatcggctttccggttatgctgaaagcgtctgcagggggaggcggaatcggcatgcagatcgtacattcagaagaagagctggccaaagcgttcgaaggcaatcaaaagcgggccgcgtccttttttggagacggcgcaatgtatatggaaaaggtcattgaaaatgcccgtcatattgaaattcagattctcgcagattctttcggcaacaccgttcatctgtttgaacgtgactgttcagtacaaaggcgccaccaaaaagtgatagaagaagcgccgtcgccgtttgttgacgatgaattaagacaaagactcggtgaaaccgccgttaaagccgctaaatcgatcggctaccaaaatgcaggcacaatagaatttctcgtcgaccaaaagaaacaaatctattttttagagatgaacacaagactgcaggtggagcatccggtgacagaagaaattacaggactggatcttgtggaagaacagctgaaaatcgccgccgggcaggcgctgactttctcgcagaaagatatcaaccaccgcggtcatgcgatagaagtgcggatctatgcggaagatccggtcaccttttacccgtcacccggtaccatctcgtctttttccgttttaagacacccgtcagtgcgacacgaatgcgccgtcgaaaagggaagcgtcatttctccgttttacgatccgatgattgccaaaatgatcgtcacggcgaatacgagaaaacaagccattgaacaactgaaaaccgcccttggcgaatatcatgtagaagggattaaaaccaacattccgctgcttacaaaaattgcacattcagaagtgtttgaaaagggtgaggcaacaaccggttttttacaaacaatgaacgagggggcgtcaaaatgagcgtcataaaaattcagatggcgggaaacctgtggaaaattcatgtgaagcccggtgatgtcattgaagaaggacaggaagtggccatcttggaatctatgaaaatggaaattccgattatcgctgatgcagcgggtacggtgaaagaagtgaaaaaatcagaaggtgatttcactgatgaaggagaggtcctgattgaacttcaataaaacgggaggtgcagcatgaactgtccggaatatgtccgcatcaatgaagtaggaccgcgtgacggcttgcagaatgaatcggcgtgggtggatacagaagataagattgagtggatcaatatgctgtcaaaaacaggccttccctatatcgaagtgacatcattcgtgcatccgagatggattccggctcttcgtgacagcctggacgtcgcaaaaggcattgccaggtctgaacatacggtctacgcggcgctcgttccgaacctcatcggactggagcatgcggcagaaggcggaatcgatcaggcctgtgtatttttatctgcaagcgaaacccataaccaaaaaaacgtaaacaaaccgattgaccggaccgttcaagagctcaggcgggttattactgaagcaaaagctgaaaaaatggcgacgagagcttatctgtccactgtgttcggctgtccgtacgaacagaacgtgccggtcgaacaagtcatccgcctgtcagacacactgctcgaaatgggtgttgatgaaatatcgctcggcgacacgatcggcgcggcaaaccccttgcaggtcatatccgtgcttgaagcccttttgccgagaattcccgcctcaaaaatcgcactccatttccatgatacaagaggaacggctctagcgaatatcattcccgctcttgatatggggattacatccttcgatacttcctcaggcgggcttggcggctgcccgtacgcccctggatcagcaggcaacgctgccacagaagacgtcatttatatgctcgaacaaatggggattgataccgggacggacatgaataaacttcttgatgccgcccgctggatcgcggataaaataggcaaagatctgccaagcagaaatctgcaggcattcagaacgaaatgagaaaggagaagccatgggagattgcgtcttgtattccgtctgtcaagaaacgatcggtctgatcacgctgaaccgcccgcatgcggccaactcgctgtcttcagaaatgattgatcatttacagcgtgtgattgaagacatcaaaaactcgccatccattcgctgtgttattctcaccggctccggaaacacattttgcgccggcgctgatttaaaagaaagagctgggatgaatcatgaacaagttaagcaaagcgtcaggcgtatcggtgaaacggctgcatccattgaagctctcccgcagccggtcattgcagcgctgaacggaaccgctgtcggaggaggccttgaactcgctctcgcctgcgatatcagaacagccgtcagccgggcgggcctcggccttcctgaaacagggcttgcaatcattcccggggcgggcggaacgcagagactgccccggcttatcggccccggcgcggcaaaagaattgatctataccggccgaaggctttctgccgaagagggaaaagacatgaagctgatcgagcatgtttgtgaagccgatgaacttatggaaaaagcaaaagcactggccggccgcatcgccgctaatgggccgatcgccgtcagacaagcaaaatccgcgataaacaagggtctggagacagatctcaatacagggctcgaaatcgaacgaaaagcatatgaacaagtcatccctacacttgacagagaagagggcctgcgcgcttttaaagaaaaaagacccctgaatacaaaggaaaataaaacatggagggactcggatggattacgaaaaagaacggcagacacgcagcaaaacgattgaaaagggaggagccgcgaaatatcatgcaagcaacgaaaagaagggaaaactttttgtaagagacaggctgaagcttttattcgatgacggcatatccgttgaagacgcttttttcgccgagtgcatgtcagacggactgccggctgacggggtcgttaccgggatcggaaccatcggcggcagaaccgtttgtgtgatggcaaacgactcaaccgtaaaggcgggctcgtggggcgcgaaaacggtggaaaaaatcatccgcattcaggagacggcggagaagcttcagtgtccgctcttgtacttagtcgattccgcaggtgcgagaattacggatcaggtcgacatgttcccgggcagaaggggagccggccgcatcttttataatcaagtaaagctgtcgggccgcattccgcaaatctgtttattgttcggtccttccgctgcgggcggcgcttacattccggccttttgcgacattgtcattatggtcgaaggcaatgcatccatgtacttaggttccccgcgcatggcagaaatggtgatcggcgagaaagtatcgcttgaagaaatgggcggcgcccgtatgcattgttctgtatcaggctgcggtgatctcctcgccccgacggaacaggaagcaatcatgatggcgcagacatatctcagctactttccggcaaattatactgaaaaagcgcccgtcaacaaatctaagaacccgaaagcttttgaaaaaccgctctcagatgtcatcccggcacatcaaaacgcaccgttcaacatgatggatttaattgaacgtgtcattgatgaagactcgttttttgagattaaaccgttatttgcgcaggaattaataacggggctcgcgcggattcacggacagccggtcggcattatcgccaatcagccgcgtgtcaaaggcggagttttatttctcgattcggcggataaagccgcaaaatttatcgctttgtgcgacgcattccatattccgcttctgtttttagcagacattcccggattcatgatcggaacgaaggtggagcaggcgggcatcatcaggcatggcgcaaaaatgatctccgcaatggcggaagcgactgttccgaagctttccgttatcgtcagaaaagcctacggtgccggattatacgcgatggcggggcctgcttttgaaccggactgctgtttagcgcttccgactgcgcaaattgccgtaatgggtcctgaagcagcggtgaatgcggtctacgcaaacaaaatcagcgagctggcccctgaagaaaggccggcttttattcaagaaaagcgtgatgaatataaggaagacattaacctttaccggcttgcctctgaaatggtgattgacggcattgttcctgctgattccttgcgggaagaactcaataaacgcctcactgcttacatgtccaaacaactgacattcacacaccggaaacaccccgtatacccggtataaataaaaaaagactgcatagatccggctcgcagccgttcttatgcagtcttttttcacagtcttgatctcattttcttcacaacaaaataaacaacaataaatacgagagccaatataatgatcggagttgtatacattccggcatagctgtctacgtctttccactgtcccccgagctgatacccgagataaacgaaaatgacagaccacggaataatggcaagcgtcgtcaatatgacaaacttggaaagaggcattttcgcaaggccggccgggatggaaatcgcatgtctgacgaccgggataaaccgcgccgagaacacaacgccggcgccgtaacggcgaaaccagttttccgcaacatcaacatgatgctttttcagaagtaagtacttgccgtacttgtccaaaaacggccgtcccccataacgggcgatccagtatataaagcactgcgcgatcgttcccccgatcacaccggcgacaatggcgccgataaagctgatcgtgccttctgacaccatatagcctccgtaagccagaacgatttcactcggaatgatttcgatcattaatccgagcgcaatccctaaatagcccatacttgtcagccaggataatatttcactaataaaattgcccacactgttcacaacctctttatctttttacccaattatatgactgattgacaagcaaaatggttacaaattattttttaacgcacgatttcttcagattctctttttaacacctcttctaaataagctaaaagtttcggtctcatttcttcccgcagaagcccgatctccgtgccggccttaaaacagccgaacttatctcctatatcaaaccggcttccttcaagctcccgcgcgtaaatgcttcgggtgcggcatacttcgcgcagcgcgtctgtcaattggatttcgctgcccgcgcctcttccgatcgtcttcagcgctttaaaaatggcaggggttaatatgtaacggcccaacacggcaatatgagagggcgccttttcaacggccggtttctcaatcagatcctcaacccggtacacatgaccgctctgccgccccgtctgtataataccatatttgctgacatcagcaggatcgacgggctgtacgccgatcgtttctgtgccgtgttggttatagacgtctatgagctgtgaaagagcgggagtgtcagataccataatatcatcacctaatagaacggcaaaaggctcatctccgataaaatgctccgcacacagcaccgcatggcctagtccgagcggttctttctgacggatgtaatgaatattggccaaatcggcaatccgctgcatttccttcagtgtctctgacttgcctttttccttaagattgatttccaactccgccgaccggtcaaaatgatcttcaatcgagcgtttgtttctccctgtaataatcagtatatcttcaattcctgactctcttgcttcttcgacaatgtactggatggccggtttgtcgacgatcggcagcatttctttcggctgcgcctttgtcgccggcagaaatctcgttcctaaacccgctgcggggatgaccgcttttctcactttttttctcattcatcttcactcctgatcctgtatgtttttcagcgaatctccaaatacccagattcggtttccgataaaattcatcatcattccgccgatagtggcggcgagcttactcaccaaaagcgaacagccgcctttttgaaacgcgtacagcagcaaaaaggtgattcccgacgctgcaagattaatgatgagaaagcgcacgatctctttcccgtcagccttgtgttttacacgaaacgtccacttccggttccacacatagctgttgatgatccctgccgaataggagcagatctgcgccggcagataggggacaaggcaagcggtgagaagaaagaagacaccaaaatcgatcagcgtattgccggcgcccacggtgcaaaaacggcctgctgtctttactttttctttcagcataacggcatccggttttgacctcccttcataagtaagatgcggatcgctgtcctatttgttgatatggattactttagcggacagtgttgaataaacaattactaaaatatgaacaaaacatgaaaacgtaatgaggctttgtaaaacccattaagttaacagttttatattttaggttgacatattacgtgcaagacactaatattctgtattagtgttaaccttttattattttggttaacattaaatttcgaaataaaagaaaggagggaaatttcatgcaggaagagacctattacagcgtcagaatgagagcttcccgaaacgcccccatgagcagggcggaaaacatatttccggcggagaacggctcatcacttacagcggtttacaggaagcggtagatggcttattacataaaggcttctcacactcaagagggatacctgattttatgcagattcagcttgaaagcgttcatgaaccgatcgaaacgatccgccctttgccggttgccctccatcaaacagacacgccggaaaaaggacaagcaatcgcccgcaagcttctgcaaaaggcggggattcctccgcacatgatcgagaaagcgtacgaaaacatttcggaatatgcagaagcaagaggagcggtcctgtttgatatccgggcaggaaaacgcattgactgcagagggaatagaggtgtgcgggtatcccgagtggattggccgtcacctgattttcaaaaatgggcttttactcacaacatgccggaaaattcacgaataaaagaagcacatgccatcgcggcaaaagtttgcgcacatccgggaattattgccgaattgtgctggtcagatgaccctgattacataacaggttacgttgctgcaaagaagctgggatatcagcggattgccaagatgaagaatgccggagatgaaagcggatgccgggttttctttactgatggctccatagatacggagagctgtatccattttttagagaagcagcctgtattcattcagcgggaggagaacatatgaaacaatcaatgattgaaaaaagcaaacagcatctttggctgcctttcacacaaatgaaagattacgatgaagatccgttcatcattgaaagcggaaacgggatcatgctgaaagacatcagcggaaaagaatattatgacggcttttcttcagtatggctcaatgtacacggccaccgcaaaaaagaaatggatgaagcgattcaaaaacagcttgaaaaaatcgctcattcgactttgctgggtatgacgaacgttcccgcaacagaacttgccgagatgctgacgggcatcacaccggaaaagctgacgcgcgttttttattccgacagcggagcggaagcaatggaaatcgctctgaaaatggcctttcaatactggaaaaacgtagggagacctaagaagcagacgtttatttcgatgcagaacggctatcacggcgatacaatcggagccgtcagcgtcggctccattgaactcttccaccatgtgtacggcccgctgatgtttgaaagctacaaagccccgattccttatgtatacagatctgaaagcggtgaccccgtacagtgccgggatgaatgccttcacgcgctcgaacagctgcttgcaaagcaccacgaagagattgccgcacttacgattgaatcgatggtgcaaggcgcatccgggatgatcgtcatgcctgaaggctttctggcaggcgtacgaaagctgtgtacggcatatgatgtgttaatgatcgttgacgaagtggcgacggggttcggccgcaccggaaaaatgtttgcctgtgagcatgaaaacgtccagccggacttgatggcggcagggaaaggcattacgggaggctatttgccgatcgctgtgacgtttgccacagaagccatttatgaagccttctacgatgactacgacaaaatgaaaacatttttccacggccattcctatacaggaaatcagcttggctgtgccgcggcaattgaaaatctgcgtttattcgaatcagagcgcatcgttgaacgagtcgccgaaaaatcaaaaacggctgcggaatttcttcatgatctgaagctgcttcctcatgtcggcgatgtccgccagctcggtttgatgtgcggcatagagcttgtgcaggataaggggacaaaacagccttatccgcctgaaaagcggatgggatacaaggtgtccttgaaaatgagagagctgggtatgctgacacggccgctcggtgacgtcatcgcctttcttccgccgctcgccagcacaaccgaccaattacaagccatgatctccattatgaaagaagcgatagccgaggtgaccggccgtggattttgacggatggctcctcggaaggctcgatgcggtgaaaagagacgggctgtatcggacgctgcgaacacaggaaaccgctcttaaaaccaaggggcaaaagcggcagacctgggcgtccaatgactatttaggtctgtcaaaagatgaacggctgatcacagccgcgcaaacagcgctgagccggttcggagcgggaagcggcggctcacggttaacgacaggaaatactgtgtggcacgaaaaacttgagcaaaaaatctccgactttaaacagacggaagcggctttattattttcaagcggttacttggcgaatatcggcgtgcttgcctcactgcctcaaaaaggcgatgtcattttaagcgatcaactgaaccatgcgagcattgttgacggctgccgtttatcaaaagcggaaaccatcgtgtaccgccatattgatatggctgatcttgagaaaaaacttgcctccgtccagactcggaaccgccgctttatcgtcacagacggcgttttcagcatggacggcaccatcgcgcctcttgaccgaataatgccgcttgcaaagcagtaccaggcatttgtgatagcagatgacgcgcatgcaaccggtatactcggggaaaacggcggaggaaccagtgactatttcggtgtttgtcctgatgttgtcatcggcacattaagcaaagctgtaggaacggaaggcggttttgccgcgggatcaaacatttttattgattttttgctgaatcaggcgcggacgtttatttttcagacggccctcccgccgtcaatttgtgcggcttcgcatacggcatttgacctcatatcagatatgcacgatacgcgccgtgagctgcagtcgtctgtcaaaaagataaaaacgcgtctggccgatatgggctttactgtaagaggcggagatacaccgattatccccgttatcatcggtgatgcaaaaacagcggtttcagccgctgcgctgcttgagaaaaagggaatctgcgccccggccatccgcccgcccgccgttccggaaggcgaaagcagaatcaggctgaccgttacggcggatcgcagcttacaggacatagacgagctgacggaagcatttgattccattagaaaagagctgaatataaacaaatgagaagtttttttgtcacaggaacagataccggcgtcggaaaaaccatcgtttcttgcggacttgccgcggcattcaggcagaaacaggcggatatcggagtgtttaaaccgtttttaagcggcgtgccgcggactcatccggaaagtgacacctcgctgttgaaaaacatgtcacaaaccgcactgtctcatgaagaaatcacgccatttgaatggaaagagccgcttgcgccgtacacggccgccatgcttgaggggaaatccgtgagcatggatgaagtcatggcccactggagtaagatcaaaaatcgtcatgagtgtttcatcgtcgaggggcaggcggcatttccgttccgcttggtgaaaattacttagtcagtgatttgataaaagccttggaattaccggcagtgattgtcgccaggcctgatctcggaaccatcaaccacacatatttaaccgttgaatatgcgaaaaacatgggaatagaggttctcggtattattatcaacggcgtaaagagccggccggggctggacgagaagacaaacccgagcatgattgaaacattatgcaaagttccgattttgggaatcacaccgaagctggatcacgtttcaccggaaaacattcaacacatgattgagaaacatatagatgtttcctctttcatgaatctgacacaaatggggagataaacatgaatcaatggatggatcttgcagagagagttctggacggggcggaagtaacgaatcaagaagcgctggccattttaaattgtcctgatgaggatcttttattgctgatgcatgccgcttttcatatcagaaaacgattttacggaaaaaaagtaaagctgaatatgattatgaatgcaaaatcaggcctgtgtccggaaaattgcgggtactgttcacaatcttcaatatcaaaagcgccgatcgagtcttatcggatggtggataagcatatattgcttaagggggcaaaacgcgcccatgacttgaatatagggacatactgcatcgtcgccagcgggcggggaccgtcaaacagagaagtagatcaagttgttgatgctgtcaaagaaattaaagaaacttacggtttaaaaatctgcgcatgcctcggtctgctgaagccggaacaggcagagcgcctgaaacaggcaggagtagaccggtacaatcataacatcaatacatcacaaaggaatcactcaaacattacgacttcccacacgtatgacgacagggtcaatacagtggaaacggcgaaacaatcggggatgtcgccttgttcgggtgtcatcgtcggcatgaaagaaacgaaacaggacgtcattgatatggcgaacagcttaaaagcgcttgacgccgacagcatcccggttaattttctgcatgcgattgacggaactccgttagaaggggtaagcgaattacatccggtgtattgcctgaaagtgctcgccttgttccgttttatcaatccgacaaaagaaatccgtatctcaggaggccgggaagtcaaccttcgttcgctgcagccgctgggactttacgccgcaaattcgattttcgtcggagattacttaacgacagcagggcagcatgaaacagaggatcatcaaatgctccatgatttagggtttgaagtcgaatccgttgaagaaatgaaagccggcctgcaatccgcctgcaatacggaggtataagatgacggcgggcctatcgactgcacatccgtccctccatgcggattcggatttttggaatgacccttacccgttttatgaaaaactgcgtgccattgatcctgtttataaaggaaccgtattaaaacatccgggctggtatgtcaccgggtataaagaagcggcagcgattttgaaagacacccggtttaaaaaccgcgtcccttttccggaagcttcaacgaaatatcaaaatctatctcatatccagcacgatatgctgttatttaaaaatcaatcagaccataagcggatgcggatgcttataggtaaagaatttaccgcaaagacggcggaatcacttcgcccctgtataaaagaaacggttcatgacttgttggatcaaatccaaaacaaaaaaaacgcagaccttgtttcagagtttgcctttccattggcaagcctcatcattgcggagatactcggagtgccgaaagaggagagatatcaattcagacaatggacggcagacgtcattcaggccattgatcttacccggtcaagaaagatgttagtcagagcaagcgacaccgcaggcaggctgactgcatatttcagagatttgattcacgagcggaaagcacatcctcaggaagacttaatcagcaggtttattatgggggaacagctttcaaaagacgaagtgctcgcgacatgtatcttacttgtcatagccggacacgagacgacggtaaacctcatgagcaacggtgtgtttactttattgaaacaccctgaacagcttagcgcactgagagaaaacccctcgcttattgaaactgctgtcgaggaatgtctgcgctacgacagccccgcgcagctgacggcacgcaccgcttcagaagactgtgaaataaatgggaagaccataaaaaaaggagagcaggtatatatccttttaggggcagccaatcgcgatccaagcatattcgatcagcctcataaaatggacatccaaagaaaaccgaatccgcatcttgcattcggaaagaacgcccatttttgcataggctcctcattagcgcgcatcgaagcacaaattgcaattctcacactgtttgagcggatgcctaagcttcggctggccgcacaccgccttgaataccgcaagctcattggttttaggtcgctcaaagagcttccggttgtccttggctgaatgaccatgcaggagggccggattttatcggttcctcttgcaggaaataaatgaaagaaaaaagaatacatatttataaagcaaaaatcctctctgatccatctcactatccctaaaaaaactcgctgctcagccattcaatatcatacagcaagaatctccttttctttcgccaaaacggaaaattcaccatgatgcacattttttcagcctcagaaacggtgcaaaatcggcatgttttctgctttattttcttgatctttgtaagcgcttactaatattgagcagaaaagagggggatttgtggacattgttattattttattggcattaggcatgctgatgtttgcggcttaccggggcttttcagtcattttattcgccccgatttgtgcgctgtttgccgtgctcctgacagatccaagcttcgtacttcctttcttctcgaatatatttatggagaagatggtaggatttattaagctgtattttcccgtatttcttttaggggccgtttttggcaaggttgttgaaatatccgggctcgccgagtcgattgcaaaaacaatcgtcaggcttgtgggagcaaaaagagccattctcgccatcgtcttaatgggtgcgattttaacgtacagcggcgtcagtctcttcgtagcggtgtttgccatttatccgtttgctaaaaacctatttattaaagctgatattcccaagcgtctgatacccggtacgattgcattgggcgcgtttacttttacaatggatgcgcttcccggcacaccgcaaattcaaaatgtcattccgacagctttttttaaaacaaacatttatgccgctccctggctcggactgattggcgcagcatttgtgcttacggccggaatgatttatttagaatcccggcgcaaaaaagcggccaatgccggagaaggctatgctggatttcaatctgaagtttccgctgcagaggattcctcaagtctggctaatgaaaaacatacgcctgttttaccgcaggaggcagaacccagccccgcgcggcaagtgctcgcctttgttccgcttatccttgtggggatcatgaacaaatgcttcacgatgtggctcccgcattggtaccctgacggatttgattttgcgcagctcggtttaaaagcgttcgggaagattgacctttcctccgtcactgcgatctggtcagtagaactcgcactgctcatcggaatcatgacaacgattttgttcgattggaaaaaagtgctcttcaatttgaaagaaggactgaatgagggcatcgggggtgccttgctggcgtcgatgaatacaggagccgaatacggatttggcggcatcattgcggcgcttcccggctttaaaatggtcagcagcggcatatcgcagacgtttactgatccgctcgtcaacggagcggtgacgaccactgcgcttgccgggattacaggatcggcatcaggaggaatgggcatcgctttaagcacgatgtcagcagcatatacagaagcaatcaatacattccacattccgccggaggtcatgcaccgggtgatttcgatggcctccggcggaatggacactcttccgcataatggcgccgtcattacgctgctcgcggtcaccgggttgacccaccgccaatcctacagggatatctttgccattaccgtcattaaaacagcagctgtgtttgtcatcatcgccatttacagtctgacgggccttgtgtagccaaaacagaaaggggaaacgaatatgggaaaaggaaaagtgatggactcttataaagatgctgctgcactgatcaaggatggagacaccctcatcgcaggaggcttcggcctgtgcggcattccggaacaattaattctcgcgatcagggacagcggcgtgaaaaacttgaccgttgtcagtaataactgcggtgttgatgattgggggttaggcctcttgcttgcaaaccggcagatcaaaaaaatggtcgcatcctatgtcggagaaaacaaaacctttgaacggcagtttttaagcggggagctggaagtcgaattggtgccccaaggaacgctcgcagaaagaattcgcgcgggaggggcgggcattccggcgttttatacacctgcgggcgtcggaacatcagtagccgagggaaaagaacataagacatttgacgggcgcacctatcttctggagaaagggattacagggaacgccgccatcataaaggcctggaaagccgatcctctgggcaacctgatgttcagaaagacggcgagaaatttcaatccgctcgctgcaatggcaggcaaagtgacgattgcagaggctgaagaaatcgtcgatgccggagagcttgatccggatcaaattcatacgccgggtatttttgtgcagcatgtgctgcttggcgggattcatgaaaaacggattgaacgccgcaccgtccggcaagcatgataaaggaggctgacagaatgagagatagcagaaaacgaatgatcaaacgggctgtaaaggaaataaaggacggaatgaatgtgaacttggggatagggatgccgacgcttgtagccaatgagataccgaatgattataacgtcctgcttcagtctgaaaacggcttgctcgggatcgggccttatccggcggaaggaacggaggaccccgatctgatcaatgcgggaaaagaaaccattaccgaggtaaagggagcctcgtattttgacagtgccgaatcctttgccatgattcgcggcggccacattgatgtagcgattctcggcgggatggaagtgtccgaacggggagatttggcgaactggatgatccccggaaaaatgatcaaaggaatgggcggcgccatggacctggtgcacggagcaaaacggattattgtcattatggagcatgttaataaatatggggaatctaaagtgagaacggaatgtacgctgcctttaaccggcaggcaggtggtcgatcggctgatcacagatttggctgtattcgattttcatgatggccgtatgacgctcaccgaactgcaggaaggtgtaacaatggaggaggtctttgagaaaacagaaggtcattttactgtcagccagtcgttaaaaaacggggtcagaccaaaatgaggaggtgccgccatggattcattgcttattgaaaaaacagccgttgtaacaggagcagccggaggaatcgggcttgaaattgcaagagaattcgcccgtgaaggagcagccgtcatcatctctgatgtaaacgaacaagcggggaaagaagcggcggcaggacttaaagatgaaggctgtgaagcagtcagcatcacatgcgatgtaacaaatgaaaagcaagtggccgacatgctgcagacggtcgagaaacaattcggacgtctcgatatccttgtgaataatgcgggcattcagcatgtcgcgcccatcgaggaatttcccaccgaacagtttgaacggctcattcgtgtcatgctgactgcgccatttatcgcaatgaagcatgcattccccattatgaaaaaacagcaattcggtcgaatcattaatatggcgtctgtcaacgggctgatcggttttcacgggaaagcggcatataacagcgccaagcacggcgtcatcggtttaacgaaagtcggtgcacttgaaggcgcggctgacggcattaccgtcaatgcgctttgtccgggatatgtggacactcagcttgtccgcaatcagttaaaggacatttccgcaacaaggaatgtaccgtacgagcgggtgcttgaggacgtcatctttccgctcgttccccaaaaacggctgctgtcagtgaaggaaatcgctgattacgctgtatttttggccagcgacaaagcaaaaggggttacaggtcaggccgtagtcatggatggcgggtataccgctcaatagttcttatatttttttaaaaacagccgctctgaacggctgtttttttatgcctgaaaaacttgttcactcaataggccgatttactgcccaaccggtatccgggctgggtcattcacatgttctgcggcgtattttgtccttgcagatttttctcatccagatccatttctgcgccgcatttataatcaagcgccatcagtttacaatccttcacagatatacaaatgaatttttacaataaacataaaatatgtaatttctgacacaataatgccaatagccctaaaacatatgaaacatgaagagcgcgacctaagtgatgaagagccggtaacaggctccactccggcttttcatcatctctctttaagactgattttcggtgaaaccccatgttttattttatgaataaatatatctaattcgtttgtaaaatcgaacaataactcctccgaaagtattctatacacatttgttataatcatgctaggatgttagataaagggataatttgtaggatattgtatttctgttcaatatgatcggaggaatctcatgaacaatcttgcctttttatttcctggacaagggtctcaatttgtaggaatgggcaaacaattttggaatgattttgtgctcgcaaagagattgtttgaagaagcgagcgatgcgatctccttggatgtaaaaaaactgtgttttaacggagatatgaatgaattgacaaagacaatgaacgcgcagcccgctattttaacggtcagtgttattgcttttcaagtgtatatgcaggaaataggggtgaagccccgcttcctggcaggtcatagcttaggcgaatattcagcgcttgtctgtgccggcgccctttcttttcaggatgccgttacacttgtaaggcagcggggaattcttatgcaaaatgcggatcctcagcagcaggggacgatggccgccgtgactcacctctctcttcaaacgttgcaggaaatatgttcgaaagtgtcgacggaagactttccggcaggagtagcctgcatgaattcagaacagcagcatgtgatttccggacaccggcaagctgtggaacgtgtcatcaagatggcggaggaaaagggagcggcatacacttatttgaatgtcagtgcgccttttcacagttcgctgatacgatcagcatctgaacaattccagactgtattacaccggtattccttccgggatgccgcatggccgatcatttcaaatgtcaccgcacgcccttacagcagcggaaattcgatcagcgaacatctcaagcagcacatgacgatgccggtaagatggacggaatcgatgcattacttgcttttacacggagtcacagaagtcatcgaaatgggtccgaacaatgttttagccggtctgctgagaaaaacaacgaatcacattgtaccttatcccttaggacagacatctgatgttcacttgctttccaattcagcggaaagaaagaaacatattgtccgtttacgcaaaaaacaactgaataaattgatgattcaatccgtcattgcgcgaaattacaacaaggattcagcggcttattccaatatgacgacggcattatttacgcaaatccaagagctgaaagagagaatggaaagacatgaaaatgagctctcagaacaagagctcaaccattcgatccatttatgcaaattaatttgtgaagctaaacagcttccggcttgggaagaattgcggattttaaaataaagcgcccaggaggggacctatgtataccagtcaattccaaaccttagtagaagtcattcgggaaagaagcaatatctctgatcgcgggatccgttttatcgaatccgataaaaacgagacggttgtctcttatcgccaattgtttgaagaggcgcaagggtatcttggctatttacagcatctcggcattaagccgaagcaggaaattgtatttcaaatccaagaaaacaaatcatttgtcgttgctttttgggcttgtatattaggaggaatgatcccggtgccggtcagtatcggagaagatgatgaccataagctgaaggtctggcgcatttggaatatattaaatcatccgtttctgattgcctctgaaaaagtattggacaaaataaagaaatacgctgcagaacacgatttacaggatttccatcatcaattaaacgaaaaatctgacatcattcaagatcaaacctacgattaccccgcttcgttttatgaacctgatgcggatgaactcgcctttatccaattttcttcaggatcgacaggagatccaaaaggagtcatgttaacgcatcacaacttaatacataacacgtgcgccattgggaatgccctagccgttcattcgaaagactctttcttatcatggatgcctttaacgcatgatatggggctcatcgcctgccaccttgttcccttcataaccggaatcaatcaaaatctaatgcctacagaattatttattcgcagacctattctttggatgaaaaaagctcatgaacataaagccagtattctatcctctcctaatttcgggtacaactacttccttaaatttctgaaaaacgaaccagactgggatttatcccacatcaaggtcatcgcaaacggtgcagaaccgatattgccggagctctgtgacgaatttttgaaaagatgcgcagcattcaatctgaaaagatccgccattttgaatgtttacggtttagcggaagcttcggtcggcgcagcattctctaaattaggtaaagaattcgttcccgtttatttgcatcgtgactatttaaatcttggtgaaagagctgtaaacgtcagcaaagaggatcaaaattgcgcttcattcgtcgaagtgggacgacctattgactattgtcagcttcggatctccgatgaagcaaatgaaagagtagaagacggaatcatcggccatatccagatcaaaggagacaatgtgactcaagggtattataacaaccccgagagtacggaaaaagcgctgacttctgacggctgggtaaaaacgggagacctcggattcattagtgaaagtggtaacttagtcgtaacgggaagagaaaaggacattattttcgtgaacggaaaaaatatctacccgcacgatattgaacgggtcgcgattgaaatggaagaggttgacttaggaagggttgccgcctgcggtgtatatgatcaaaagacacaaagcggagaaatcgtgctctttgttgtttacaaaaaatcacctgaaaaattcgcaccgcttgtcaaagagataaaaaagcatttgctcaagcggggcggctggagcataaaagatgtccttccgatccgaaaactccctaaaacaaccagcggaaaggttaaacgctacgaacttgccagacagtatgaggcagggaatttttcaacagagtctgccgccatcaatgaatatttggagagcagcccggaaacgtccggacagactcccattcatgaaattgaaacggaattactgtctatcttttccgatgtgctcaatgggaaaaaggttcacctcgctgacagttattttgatatgggagcaaattcattacagttatcgcagattgccgagcgcatagaacagaaattcggacgcgagcttgccgtttcagatctctttacgtatccttctatcactgatttagcggcatatctgtctgaaagccgggctgaaatcaagcaggacgtggcagcgaaaccaagccacgtgacgccgaaagatatcgccattatcgggatgtcgctcaatgtccctggagcatcaactaaaaatgatttttggaatctgcttgaaaaaggtgagcacagcattcgagaataccctgcatcccggctgaaagatgcggcggattatttaaagtccatccaaagcgaaatcaatgagaatcagtttgtgaagggcggctatttagatgaaatcgaccgctttgattactcgttcttcggtttagctcctaaaacggctcagtttatggaccctaaccaaagactgtttttgcagtctgcatggcatgcgattgaagatgcgggctatgccggcggcagcatgaacgggagccgtgtcggggtatatgcagggtactcgaaggtgggctacgattatgaacgtctcctttctgcgaattatccggaggagcttcatcaatatatcgtgggcaatctcccttccgtgttagccagccgaatcgcttatttcttaaatttaaaagggccggcggtgacagtcgatacggcgtgctcctcatcgcttgccgccgttcatatggcatgtaaatctttaatatccggcgattgtgaaatggctcttgccggcggtatccggacatcgctcttgccgatctgtatcggacttgatatggaatcttcggacgggtacacgaaaacgttcagcaaagattcagacggtactggcacaggtgaaggcgcggccgcagtcctgctgaaacctctgcaggatgctgttcgcgacggagaccatatttacggcgtaatcaagggaagcgcgttgaatcaagacggaacaaccgccgggattacagcaccgaatccggcagctcagactgaggtcattgagacggcctggaaagacgcgggcattgcccctgaaacactgtctttcatcgaagcgcatggcaccggaacgaagctcggcgatccggttgaatttaacgggctttgtaaagcgtttgaaaagtatacggcaaaaaaacaattttgtgcgattggttctgttaaatcgaacatcggtcatttgtttgaagcggcaggcatcgtcgggctgatcaaatctgtcctcatgctgaatcacaagaaaaatccgccgttagtgcactttaatgaacctaatccgctcattcattttcactcttcaccattttacgtaaaccaggaagctgcagcgttcccatccggtgatgagccgctgcgaggcggagtcagctcatttggctttagcggaacgaacgctcatgtggtattggaagaatatatttctcaaagtgagtatgcgcccgaggatgaacatgggccgcacctatttgttttatccgctcatactgaaaaatcactctatgaactcgcacagcagtaccggcaatatgtatcggatgacagccaagcttcattaaagtccatttgctatacagccagtacgggcaggactcatttggatcatggcattgccatgattgtatccggtaaacaagaactatcggataagctgacccgcctgattcagggagacagaaaccttcccggtgtatacatcggctacaagaatatgaaggaaatgctgcccgctcataaagaagagctgaataaacaagcagccgcactgattaagcagcgtttacgtacgcaagatgaacggatcacatggctgcatcgcgccgccgaattatttgtgcaaggagccgttatcgattggcgcgcgctttattcaggtgaaactgtacaaaagacgccattgcccgtgtatccgtttgaacggagccgatgctgggctgaagctgaccaattgcgcttaaacgaggacgaaaagagaggagaagcggcattgaatatcaatcaatcgaagtcgcacattgaatccttcctgaaaactgtaatcagcaatgcttcggggatcagagcggaggaactcgatctgaatgctcattttatcgggctcggaatggattctatcatgctgtcacaggtcaaaaaagccatcgcggacgaatttggggcagacatcccaatggatcgtttttttgatacgatgaacaaccttcaaagtgtcatagattacttggctgagaccgttccatcgtcctttgcatccgctccgcctcaagagaatgttccggcgcaggaaatacaggtcatttcagaagcacagtctgaatcggatcgcagagaaggtcaacaagagcatatgcttgaaaaaataatcgcttctcagaatcaattaattcaggataccttgcaagctcaattaaatagctttaatttgttgagaaacagcggacatcattccgatgagaaagaatacgctaaagcgcaagagaaatcaattccttctgtcaagcaggggcctccggccgtcactgcagaaaagaaagcggctcaagaagcgaaaccctatgttcctttccagcctcagaacctgcatgaacagggacactataccgcacggcaaaaacaatacttagaagatttcatcaagaaatacgcagataaaacgaaaggttccaaacaatatacggacaacacccgatttgctcatgcaaacaaccgcaacttgtccagcttccgttcgtattggaaggaaatcgtatacccgattatcgccgaacgttctgacggttctaaaatgtgggatattgacggaaatgaatatatcgatgtcaccatgggattcggggttaaccttttcgggcatcatccttcctttattacacaggttatcgatgattcagcccgttcatcattgcctccgctcggcccgatgtcagatgtcgccggtgaagttgccgaccggatccgcacatgtaccggagtggaaagggtcgctttctataattccggaacagaggccgtcatggttgccctgcgtttggcgcgggcagcaacaggaagaaagaaagtcgtggcgttctcgggatcttatcacggcacgtttgacggcgtattaggggttgccggcacaaaaggcggagccgcgtctgcgaatccgctggctccgggtatactgcaaagctttatggatgatttgattattttacattataacaatcccgattcgctggacgtgatccgcagtcttggtgatgaattggcagccgtactggtggaaccggtacaaagccgcagaccggatttgcagccgcgggcatttttgaaagaattgcgggcgatcacgcagcaatccggaacagctctgattatggatgaaattattaccggatttcggatcggtctcggcggcgcacaggaatggttcggcattcaggctgatttagtgacctacggaaaaatcatcggcggcggacagccgttaggggtagttgccggaaaagctgagttcatgaatgcgatcgacgggggtacctggcagtatggggacgattcctatccgcaagatgaggcgaaacgcacgtttgtggccggcaccttcaatactcacccgcttaccatgagaatgtcgttagccgtgcttcgccatttacaaaccgagggagaacacctgtatgaacagctgaatcaaaaaacagcctccctggttgatcggctgaatcgcttctttgaacaatcgcaagtgcctatccgcatggttcaattcggttctttattccggtttgtctcatcgcttgataacgacttgttcttttaccatctcaattataaagggatctatgtgtgggaaggacgcaactgcttcctatccacggcgcataccgcggatgatattgaacacatcattcaagctgttaaagacacggtgaaggatcttcgccgaggcggatttattccggaaggcccggattcccctgatgacggcggacataacaaatcaggggcgtacgagctttcagatgaacaaaaacaattggttatggcatcccattacgggaatgaagcgtccgccgctttaaaccagtccattatgctgaaagtggagggcgaactgcagcatacaccattaaaacaagccgtccggcatatcgttggccgtcatgaagctttacgtacagtgattcatcccgatgacgaggtacagcaagtgcagaaacggatgaatatagaaataccagtcattgattttactgttcacccgcatgaacatcggcagtcggaaattcaaaaatggctgacagaagatgccaagcggccgttccatttccatgaacaaaagcctttgtttagaatccatgtgcttacatcggctcacaatgaacatctgattgtgctcacgttccatcatatcattgtcgatggatggtcaatcgccgtatttgttcaagaactggagagcaactacgcggcaatcgtacaaggaaaaccgatttcaccgaaagaggcagatgtttcgtttcgccaatacttagactggcagcaggcacagattgacagcggccattatgaagaaggggtccgttattggcggcgtcatttctctgaaccgattcagcagccaattctgccgagcacaggttctgtccgttatccgaacgggtatgagggagaccggtgtaccgtcaggcttggacggccattgagcgaggctttaaggtcattaagcattcagatgaaaaatagcgtatttgtgacaatgctgggtgcatttcatctttttctgcaccggcttaccaaacagtcaggccttgtgatcgggatccccgcagcaggtcaatcgcatataaaacagcatgatctgattggaaattgcgtcaatatgattccggtgaagaacacgtctacttcagaaagcactttaaccggttatcttggcagtatgaaagaaagcgtgaatcttgcaatgcggcaccaagccgtcccgataacactggtggccagagagcttccgcacgatcaagtgccggatatgcgtattatctttaatttagacaggccttttcgaaagctgcatttcggaaaggcggaagcggagcccgttgcatacccggtaaaatgcaccctgtacgatttatttcttaacataacagacgcgcatcaagaatatattcttgatttcgactttaatacgaacgtcatcagtccggaaatcatgaaaaagtggggagcgggttttacaaaattgctgcaaaaaatggttgagggagattcaatccctcttgacgccatgatgctgttttccgatgaagaacagcatgatttacaagcactttatgccgaacaccagaagcgggtctcttcaataggaagcaatacagcaaatttcactgaagcctacgaggcgccgataaatgaaacggagcggcagctggcgcggatttgggaggaacttttcggccttgaacgggtcggcagatcagatcgcttcctggctctgggaggaaactcgctccaggcgacgcttatgctttccaaagttcagaagacatttcatcaaaaggtttccatcggacaatttttcaatcaccagactgttaaggaattagcacatttcattcagaacgaaacaaaagtcgtgcacctcccgatgaaggctgccgagaaaaaagcgtattacccgacatcgccggcgcagcaaagagtatatttcctgcaccaactggaaccggatcagctggcgcaaaatatgttcggccaaatatcaataacagggaagtacgatgagcaagccctgatctcatctcttcaacaagtgatgcagcggcacgaagcgtttcgcacgtatttcgacattatagatggcgatatcgttcagaaacttgaaaacgaagttgattttaacgttcatgtccggacaatgagccgggacgaatttgatgcctattcagaccggtttgtaaaaccgttccgcctggaccaagctccgttagttcgtgcggagctgatcaagattgaaaacgagcaggccgaactgctcatcgatatgcatcatatcatttcggatggttattccgtcaacatccttacaaatgaattgctggctttatatcatcagaaaccattaccggacattgaatttgaatataaagatttcgcagaatggcaaaaccaacggctgaatgaggatgccatgaagcggcaggagacatattggctggaacaatttcaagacgaaattcccatccttaacctgccgacagacggttcaaaagcggcagaacggtcttctgagggacagcgagtgacatgctccttacagccggatgtcatccgttcgcttcaagatttggcgcaaaaggcggaaaccactctctatacagtgctcctggccgcctataatgtgctgcttcataaatataccggacaagaagacattgtcgtaggcacgcctgcttcaggaagaaatcatccggatatcgaaaagatcatcggtattttcatacaaaccatcggaatccggacgaagccgcacgccaatagaacgttcacggattatctggaagaagtaaagcggcagacgcttgacgctttcgaaaaccaagactatccatttgaccggcttgtggagaaattaaatgtgcagcgggaaacaaccggaaagtctctgtttaacacgatgtttgtgtttcaaaacattgaatttcatgaaatccggcacaatgaatgtacatttaaagtgaaagaacgaaatccaggggtctctttgtatgatttgatgctcacgatcgaagatgccggtcaacagatagagatgcattttgattataaaccgggacgattcacaaaagacaccattgaacagatcaccagacactataccggcatcttaaacagtcttgttgagcagccggagatgacattgtcttccgttcctatgctgtctgaaaccgaacggcatcaactgctgacggagtgtaacggcacaaagacgccgtatccgcataacgaaacagtaacccgatggtttgaaatgcaggcggaacagagtcccgatcaggaagccgttatttttggcaatgagcggtatacgtacagacagctcaatgaacgggcgaaccgattggcgcggacgttacggacaaaaggcgtacaagcggatcaattcgttgccatcatctgcccgcatcggatcgaactgattgtcggaattttggctgttctgaaagccggcggcgcatacgtgcccattgatcctgaatatccggaagatcggatccaatatatgctgagagattcaagggcggaggttgtgttgacacagcgcagcctgctggatcaattaccgtatgatggtgacgttgtgcttttggatgaggaaaactcataccatgaggatcactcgaatcttgaatcggacagcgatgcgcatgatttggcctacatgatctatacgtcaggttccacgggaaatccaaaaggtgtcctcattgagcatcagggactggctgattatatttggtgggcgaaagaggtttatgtaagaggtgagaaaaccaacttcccattatactcttccatctctttcgatctgactgtgacctcgatatttacaccgctggttacgggaaataccatcattgtctttgacggcgaagacaaaagcgctgtgctttctgagattatgcgggactcaagaatagacatgatcaaattgaccccggcacatctgcacgtcatcaagaagatgaatatcggtggcggcaccgcaatacggaaaatgattgtcggcggagaaaatttaagcacccgtctggccaaaagtgtcagcgagcagtttaaaggccggctggacatttttaatgaatacggaccgacggaagctgtcgtcggatgtatgatttatcacttcgacgcagaacgggacaagcgggaatttgtaccgatcggcactccggctgccaatacggatatttatgtggccgatgcaagcagaaatctggttccgatcggggtaatcggcgaaatatatatcagcggaccgggtgttgccagagggtattggaaccgtccggatttaacggcagagaaatttgttgaaaacccgtatgtcccgggagcgaagatgtacaaatcaggggatttggctaagcggttgaaggacggaaatcttgtatatatcgggcgcattgatgaacaagtcaaaatcaggggacaccgaatcgagcttggtgaaattgaagcagcaatgcataacgcggaagcggtgcaaaaagccgcggttacagtgaaagaagaagaagacggcttaaaacaattatgcgcgtattacgtaagcgacaagcctatagcggctgcgcagcttagggaacaattgtcatcggagcttccggactacatgattccgtcctattttgtccaactggagcatatgccgttaacgtccaacgggaaaataaaccgtaaggcactgccagcaccagaagcgagtctgcagctgacagctgaatatgttccgccgggtaatgagacggagtccaaactgacagatttatggaaggaagtgctcggaataagccatgcggggatcaaacataatttctttgatctcggaggcaactccatccgagcggctgccttagccgccagaattcacaaagagctggatgtgaatctgtctctaaaagacatattcaagtttcctaccattgaacaattggctgacaaggcgttacacatggacaaaaaccgatatgtaccgattccggctgcaaaggaaatgccatattatccggtttcttcagctcagaggcgtatgtatttgttaagtcacacagaaggcggcgagctgacttacaatatgacgggtgccatgaatgtggaagggacgatcgatcccgaacggttaaacgccgctttccgaaaattaatcgcgcgtcatgaagcgttgcggaccagctttgatttatatgaaggcgagccggcacagcgtattcatcagaacgtcgactttacgatagaacggattcaagcaagcgaagaagtagcggaagaccgtgtgcttgatttcatcaaagcgtttgacttagccaaaccgccgctgatgcgggccggactgattgaaattgaacctgcacggcacgtgcttgtggttgatatgcatcatatcatttctgacggcgtgtccgtcaatattctgatgaaagatttaagccgaatctacgaggggaacgaaccggacccgctctctattcaatataaagactttgcagtttggcagcaatcggacattcagaaacggaacatcaagagccaggaagcgtattggctggatcagtttcacagtgatattcctgtactggatatgcctgcggattatgagagacctgccatacgcgattacgaaggcgaatcatttgaatttcttatacccgaacacttgaaacagcgtttaagccaaatggaagaagacacaggagcaacactgtatatgattttattggcggcctatacgattcttttatccaagtacagcggacaagaagatattatcgtaggaacgccatctgccgggcggactcatttggatgtagagccggtcgtgggaatgttcgtcaatacgttagtcattcgcaatcacccggcgggccgtaaaacatttgatgcctacttaaacgaagtaaaagaaaacatgctgaacgcctataaaaatcaagactatccattggaagaattaattcagcatctgcatcttccaaaagattcaagccgcaatcctttattcgatacgatgtttgtgctgcaaaatctcgatcatgctgaattgactttcgattctcttcaactcaagccgtattcatttcatcatccggttgccaaattcgatttgaccttgtcgattcaggcggaccaagacaactatcacggactgtttgaatattcgaaaaaactgtttaagaaaagcagaatcgaggttttatcaaacgactacttacacattctatcggcgattttggaacagccaagcattctaattgaacatatcggattgagcggcagcaatgaggaagaagagaacgcgcttgattctattcaattgaacttttagggaaaagcattatttctttaaattatataaaatgaggtgctccaatgtcggtatttaaaaaccaagaaacgtactgggaaaacctgtttgatgaagaagacggattaagcgcattcccttactttaaagcagcggataaagcgtcgtttgcccgtaccggctaccaggaaaaatgcatctgccgttccttatctccggaagtatctcaaagaatcatgacaatggcgaatcattccgatatggcggcctatctgattttattggcgggtattgaatgcttgttatataaatatacggatcaaacgagcctgattcttggcattccgacggtatcgaagcaaaaagccggccagtcagccgttaacaacattgtcctcttaaaaaatacgctttcaaacgagagtacatttaaaaccgtattcgggcagctgaaagaagccgttaatgattctctgaaaaatcaaaacctgccgtttagaaaaatggttcagcatctgagcgtgcaatacaatgacgagcatctgccgttgattcataccgtcgtttcgcttaacgaaattcattccttgcaatttaaagaagatactgcagccgatacgctgtttcactttgatttggagaacaacgggattcatttgaagcttttttataacggcaatctgtacgatgagcgctatatcaatcaaattgtgtcccatttggatcagctgctgtctgtgattctgtttcagcctcaagccgcgatccatacggcagagatcttaccggaagcggaaaaacagaagctattgtttgattttaacgacaccgtcagagatttctccgggagcagaacagtctatcaattatttgaagagcaagcagaaagaacgcctgagcatgcggccgtcaagtttaaaaacgaccatttgacgtacagggaactgaatgagaaggcgaaccgtttggcaagaacattgcgtaattgcggggttcaacccgatacgttagtcgccattctcgctgatcgttcattagagatgatcgtatccattatagccgtttggaaggcagggggcgcttatgtgcccctggatcctgaatatccaaaagagcggcttcaatatttgcttcatgatgcggatgcagacgttctccttgttcagcgtcatttaaaaaacagtctcacctttgacggcccggtgattgatttgaatgatgaaacatcataccatgccgatagctcattgttatcaccagcaacgggacacagccatttagcctatgtcatttatacgtcgggtacaacaggaaagccgaaaggagtcatggttgaacacggcggcattgtgaattcgctccaatggaagaaggcgttttttaagcattctccggcggatcgcgtgcttgtcttgtacccgtatgtttttgatgcgttcattttaaatttcttcggcccgctcatctcgggggcaactttgcacctattgcctaatgaagagaataaagaaactttcgccattcaaaatgccataaaacaagagagaattactcatttctcaacttctccccgtcttctgaaaacgatgatcgaacagatgaacacagaggacttcatccatgttcagcatgttgttgtaggcggtgagcagctggaaacagatacagttgagaagctgcattctctgcagcctcgcattcggatcaataatgaatacggaccgacagaaaacagcgtggtatctacatttcaccctgttcagtccgctgatgaacagatcacaatcggcagcccggtggccaaccatcaagcttatattttaggagcgcaccatcaaatccagccgatcggcgtaccgggagagctgtatgtcggaggagcgggagtggcccgcggctacctcaatcgtcctgaattgacggaggaaaaatttgtggagcatctgcatgtccctggtcaaaagatgtataaaacgggtgatctcgccagatggctgccggatggaagaatcgaatatttagggcggattgatcatcaagtgaaaattcgcggctaccggattgagatcggcgaggtagaggcagccatgttcaatctggaaaacgttcgtgaagccgcagtcgtcgcgcgggaagacgcagacggggccaaacaattgtatgcctattatgtcggcgggccttctttgaccgctgcgcagttcagaaaagaattatcccgggaactgccgaattatatgattccctcccgctttatcccattggaacgcattccgctcacttccaatgggaagattgatctgaaagctttgcctgctgctgacgaaaatacgcgggcggaatacgaatacatagccccgcggaacacaatagaagaactgctggcgtctatctggcaagaagtattaggggcagaacgtataggaattctggataatttctttgattttggcggagattcgattaagtcaattcaggtgtcatccagattgtatcaagccggatacaaggttgatatgaagcatttgtttaaacacccctcgattgctgaacttagtcagtttgtagcgccggtcagcagggtggctgatcaaggagaagtgaatggcggaaccaagctgaccccgattcagcattggttttttgaacaaaacatgccgcatgcacaccattacaatcaggccgtcatgttatattcggcggaaagctttaaagaggctccgcttcgccggacgatggaacagatcgcgtcgcatcacgatgccttgaggatgatttttgaaaaaacgccggatggatacgctccgcgaattacaggaacagatgaaagtgaactataccatctggaagtgatgaattataaaggggaaaccgatccggctcaagcgattgccgataaagcgaatgagattcaaagcagcatggtattagacaaagggccattgatgaagctcggtttgttccaatgtccggacggagatcatttgctgattgcaattcatcatttgctgattgacggagtatcctggcgtattttgctcgaagattttgcaagcggttatgagcaggcagaacgcggacaaacgatccagctcccgcaaaaaacagattcgtttccattctgggccgatcaattgtccaaatatgcggcggaaaccgacatgaaagaggagattgcttattggactgagctttcaagcataaagcctcagccattgcctaaggacactatcagcgaaggatcgttattaagtgacagcgaagaagtgacgattcaatggacaaaagaggaaacggagcaattattaaaacaagcgaaccgcgcctacaacacggatatcaacgatctgctgctgacttcgttagggctggctgttcacaagtggacaggcacggaagacattgtcgtgaatttggaaggccacgggagagaaccgattattccggatgctgacatttcccgcacgataggatggttcacaagccagtaccctgtcgtcctgaggatggaagccggaaaagacctgtcgcagcggatcaagatcgtaaaagaagggctgcgccgcatccctgataaaggaatgaattacagcatcatcaaatatatatccgggcatccggaagccgacagcatgcagctgaatccggagatatcgtttaactatttgggacaatttgaccaagacctgaagcatcaggctttgcgcatatcgccatattccacagggttatcgatgaacgaaaaccaagagagaacggccgtgcttgatttgaacggcatgattgccgaagggacattatcactgacactgagctacagcagcaaacaatacgaaagatctactatggcgcaatttgcccaagggttgaaagaaagtctgcaagaagtcattgcgcattgcgtaagccggcagcagacttctctcacaccaagtgacatcctgttaaaagatatctcaatcgacgaactggaacagcttttggagcagacgcgtgaattaggcgaagcggaaaatatttatccattaacgccgatgcagaagggcatgctgtttcacagcttatttgatccgaattcaggtgcttattttcagcaaacgatgtttgatctgcatggagatctggagattgattcattttcaaaaagcttggacggcttatcgcaaaaatatgatattttccgcacgaatttttacagaggctggaaggatcagccgctccaaattatattcaaaacgaaaaaaatcggttttcaattcaatgacatacgagagatgaaggaatcacaaaaagaagcgatgattcagcagtatgccagagaagataagatgcgggggttcgacttagaaaaaggcgcgttaatgcggctattcatccttcgtacggatgaaaagacataccgttttatctggagcttccaccatattttgatggacggctggtgcctgccgctgattacaaaagaaatattcgagaattactttgccttgcttcagcaaaagcagcctgaacaatcatcaattactccgtacagtcaatatattgaatggctcggccggcaagatgcgaaaaaggccacggcttattgggatcaatacttggagggatatgaggagcaaaccggccttcctaaggatcaccatgcagcggaagacggacgatacgttcctgaaaaagtgacgtgtgacataagctccgatctcacttcgaaaatgaagcggacggcaggccagcatcatgtcacgctgaacacgctgctgcagacggcatgggcggttttgctgcagaaatataaccgcagccgggacgttgtgtttggaagtgttgtatccggaagacctgctggaattccaaacgtggaaaccatgatcggcttattcattaacaccattcccgtccggttccggtgtgaagccggaacaacgtttgccgagcttatgaaagaggcgcaagaaagggctgtagcgtctcaacaatttgagacgcacccgctgtacgatattcaagcgcgcacaacgcaaaaacaagatttaattacacatttaatgatattcgaaaattatccggttgatcagtatatggaaagtataggccgccagaacggaacatccatcacgatctccaacgtgcaaatggaagaacagaccaactacgattttaatttgaccgttataccgggcgacgagatgaccatctcttttgaatacaatgcaaatgtgtatgatcgggcaagcatagagcgggttcgggaacatttcatgcaaatcctgcaacaagtcgtgacaaatgcggatatccgggtggatcaagcggaattgttaacggaaggcgaaagaagaacccttctgcagacgcttaacgacacggccgcgccgtttccgcagacgccggttcatcaattatttgaagagcaatcgcagcgtacgcccgatcaagcagccgtcattgataaggacaggcagctcacgtacggagagctcaataagcgggccaaccgactcgcgcgaacgttaagagcgaaaggagtccagacggatcagcctgtagccatcatcacgagaaacagcatcgaatcggtggtcggaatccttgccgttttaaaatcagggggagcctatgtccctatagatccggaatatccgcaagaccgcatacggtatatgctggatgactcccaagccggaatcgttttaatgcagcgggacgtcaggaaacagcttgcctatgaaggcgtcacggttttacttgatgatgaaagttcttatcaccaagatggctctgaccttgctcagataaatgatgtgagccatttggcatatgtcatttatacgtcaggttccacaggccggccgaaaggcgtactaatcgagcaccaaggcttgaccaattatatttggtgggcgaaagaggtttatgtaaaaggcgagaaagccaacttcccattgtattcgtcaatttcttttgatctgacggtgacttctattttcacgccgcttgtcacaggaaatgcaatcatcgtctatgacggagaagataaaacagctctgcttgaatcgattgtgcgagacccgagggtggatatcattaaattgactccggcccatttgcaggttttgaaagaaatgaacattgccgatcaaacggctgtccgaagaatgattgtgggcggggaaaacttaagcacccggttagcccgcagcattcatgaacagttcgaaggccgggttgaaatatgcaatgagtacggaccgacggaaaccgttgtcggctgcatgatttaccgttatgatgccgtaaaggacagacgggaatcggtaccgatcggaaccgctgcggcaaacacgagcatttacgttcttgatgagaatatgaaacccgcgccgatcggagtgccgggagaaatctatatcagcggcgccggtgtggcaagaggatatttgaaccgtcccgaattaacggcagagaaatttgtcgatgacccgtttgaacccggagcgaagatgtataagaccggagatttggcgaagtggctggcggacggaaacattgaatatgcgggcagaatagatgaacaagtgaaaatcagaggttatcgtatcgaattaggcgagatcgaggcggcactgcttcaagaagaagcgatcaaggaagctgtcgttacagccagagaggatgtccacgggtttaaacaattgtgtgcatattacgtaagcggcgggcaaacaacggctgcccggctccggaaacaattgtctcatacccttgcaagttatatggttccggcttattttatcgagcttgatgaaatgcctttaacttctaacggaaaaataaacaaaaaagggctgccggctccggatttcgagctgcaggacagagcagagtataaagctccccgaacaaaagcggaagaaatattagtttctgcctgggaatcggtattaggcgctgaaaacgtcagtattcttgataatttctttgaccttggcggagattccattaaatccattcaagtatcctccagattaaatcagcaaggatacaaaatggaaatcaaagacttgtttcaatatgcaacaattgcagaattgagtccgcatatcaagcagaatctgcgtatagccgatcaaggtgaggtcaaaggaaaagtcagcctgactcctattcagcattggtttttcgaacaaataacgacagatcagcattattataatcaagccgtcatgctgcatgcgccggaaggttttcaggaaacgcagcttcgtcaaaccctgcaaaaacttgctgaacatcacgatgcgctccgcatgacgttccggactacggaaaatggctgcgaggcacagaatgaagaaatcgcccaaagcggactgtaccgcttagaagtcctgaatctgaaagaagattccgatccgggacggacaattgaagccaaagctgatgagatacaaagcagtatgcgtttaagtgatgggccgttaatgaaagccgggttgtttcaatgcgcaaatggagatcatctgctcatcgccatccatcatttgattatagacgggatttcatggcgcattttactggaagatatcgttagcggctacaagcaagccgagaatgggcgagtgattcaactgccgcaaaaaacagactctttccaattatgggctaagagactttcagaatatgcgaaaagtgaaaccataaaacaggaacaggaatattggacaaagatcgaacaaaccgaagtcaaaccgctgcctaaagattttcatgaaacccatacaactgcaaaagacagtgaaacagcaactgtggaatggacgaaagaggaaacggagctgctattaaaacaagcgaatcgcgcttataacacggagataaacgatttgcttttaacttctctcggtctttccatatcgcattggtcaggactgaaacaaattccgattcatttagagggacacggccgagaacagattatacaagatatagatatctcccgcacggtcggatggtttacaagtctgtatccggttgtgctgcacgcgcagccgggcaaagagatctctgattatatcaagacgaccaaagaaggattgcgccaaattccgcataaagggatcggatatggaatagcaaggtacttaagcggcggaatgccatcgaaactcaatcctgagatcagctttaactacctgggacagtttgaccaagatttacagcagcatggggttcaattatcttcttattcttgcggttcagactctagcggaaatcaagaaagaccgtatgtattgaatataaacggaatgatcaccgacggccggctgaagcttacgatcagctacagcagcaaacagtacgcaaaagaaacgatcatgcggttatcggaaacgattcaaagccgcctgcggacaatcattacgcattgcgtccatagagaacaatcggaactgacgccaagcgatattttgttaaaaggcatgtccattgacgaattggatcagctcctcattcaactgccgcatgcaggtgaggttgaaaacgtgtatccgctcactccgatgcagaaaggaatgctcttccacagcctgctggacgaggcctcaagttcttattttgaacaagcatcgttcgatttgcagggagaattaaagattgattggtttaaagcaagccttgaacgattatttgaaacatacgccgtgctcagaacccgtttttacagcggctggaacgatactcctttacaaattgtctataaaacgcaaacaccgcaaattcattttgcagatttgcgtgatatagaggagcacctgagagaggatgcaatcgcagcctatcaaagagaagataaggcaaaaggatttgacttggctcgggatccgctgatgcgcatagcgattttccgtatggaagaccgcaaatatcatttgatttggagcttccatcatattgtgatggatggctggtgcctgtctcttatcacgaaggaagtgtttgatcattatcgcgccttacaagaaggcagggaaccagaaccgtcatcggcagctccttacagcaactatatcgagtggcttgaccgccaagatcagggagcggcaaagcggtactggagcgggtatctcgaaggatataaaggtgaaaccacgcttcttcataaaatagagcagcatgaacaaaaagaatacgcctatgccaatgtgacctgccgatttgatcacgaacagacaaaacaattacagcagatcgcaaatcagcatcaggttacattaaatacgttgatccaaacgttatggggagttttattacagaaatacagcgggtccgcagacgttgtcttcggcagtgtcgtgtcgggaagaccggcggaaattcctgatgtggaacagatgatcggcctgttcatcaataccattccggttcgcatccgctgcgatgaggacagcacttttgctgatacggtgcaaatggttcaacaaaacgctctggcttcccaatcatacgatacctatcctttatacgaaattcaggcccaaacggaacaaaagcagaacctgattgaccatatcatgatttttgaaaactatccgatcggtcagcaggtcgaagagacgggacatcatagtacggagctgaacattacgaattttcatatgctggaacactcccactatgatttgaatgtagttgtcatacctggcaaacagctggccgttcatttcggttttaatgaaaacgaatatgaaaaatcagaagtggagcggatctgcggacattttgaacagctcatgcagcaagtattacagcagccgtctgtcaaaatagaagaattggagcttctctctaggcaagaaaaagaacatttgctcagccgctttcagtctaatgacatgcattacccgcttgaacaaacgatacatgagctgtttgaggaacaggcgcatcgtactccggacaatacagcggttgtattcgagggtaaacaactcacctacggagaactgaaccggcgtgccaatcagcttgcgcgaaccttgcaggcaaaaggtgtgcggaacgataagcttgtcggtattatgactgaacgctcgcttgagatgattgtaggcatcttgggagttttaaaagcgggcggcgcatatttgccgatagatcctgattctccgtctgaacgcatcagttatattttaaatgattcaagcatcagcgtattgctttaccgcgggaagctgcaggatgacatcggcttctcaggaacatgtatcgatctcatggaggaacatttctatcaccaaaaagacagcagtcttgcactctcttatcagtccagtcaactggcctatgccatttatacttccggtacgacaggcaatcctaaaggcacgttaattgaacatcgccaggtcattcacctgattgaaggacttcgacgccaaatttactctgcctacgatgcggagctgaatgtagccatgctcgctccatattatttcgatgcttctgttcagcaaatgtatgcttccttgctgtcaggacataccttgtttattgttccgaaagagattgtgtcagacggtgctgccttatgccgttattatcggcagcattcgattgacatcaccgacggaacacctgcccacttaaagcttttgatagctgcaggtgatttgcagggagttccgcttcagcatcttttaatcggaggagaggcactttccaaaacgacggtaaataagctcatgcaattattcggcgatcatggcgcttcacctgggattaccaatgtatatgggcctacggagacttgcgtagacgcgtctctgttcaacattgaatgttcttccaatgcgtgggcacgcagccaaaactatgtccctataggcaagccgttaggcagaaaccgcatgtacattcttgattcaaaaaaacggctgcagccggcgggcgtccaaggcgagctgtatattgcaggggacggcgtcgggcggggttacttgaacctgccggaactgacggacgaaaaatttgttgccgatccgtttgtaccggaggaccgaatgtacagaaccggtgatctggcccgccttctgccggatggaaatattgaatatatcggccggattgatcatcaggtgaaaattcaaggttttcggattgaactcggtgaaatcgaatcggtgatgctgaacgttcctgatattcaagaagccgccgcagctgcccttaaagatgcagatgatgaatattacttgtgcggatactttgctgcggataagacaatacagatcagtgaacttcgcgaaagaatggcccggcatttaccgggatatatgatcccggctcaatttgtgcagctggataagatgccgctgacgccaaacgggaagttgaatcgccagttattgccggctccggtcaaaaagcgtgacggcggcatagagtacgtcccgccgcaaacttcggaagaaatccagctgacagcaatttgggaagatgtcctcgggttagagcaggtggggatcagagatcacttttttgagatcggcggacactccctgcgggcaacggcgctgattgcaaaaatacaaaagcaattgcatgtccaaattcctttgcgggacgtcttccgtctcccaaccattgaacagctcgcacagacgatcacgaagacggagctgaccggatatgctgcgattcctgcaattgaaaaaagaccttattatccggtatcctcagcacaaaaacggttgtacatcctgaatcacttggaaggcggagaactcagttacaacatgctgggactgatggctgtcgaaggcaagcttgaccgtgacaagctgcagcaagccttccgcacgctgattttgcgccatgaatctttgcgcaccggttttaaaatggctgacggagaacccgttcagtatgtcttagatcacgcaaagttcgaagcagagtggtatcaggcagaagaaaatgatgcggacctttatatccgcaaatttattcgtccatttcatctggatgagccgccgctgcttcgcgtggggctgattgaacttcaacctgaccgcggaattctgatgtttgatatgcaccatattatttctgacggaacatccatgagtgtattgattaaagaatttatccgcatttatgaaggagaaacattaccgcctttgcgcatccagtataaggactacgcagtatggcagaccggcgaagcgcggttaaaacagatccaaaatcaagaagcctattggttagagctgtacagcggcgacgttcctgtccttcatctgccgaccgattatatccggccgtcggcacgggattttgcgggagccacaatgcagtttacgcttgataagcaaaaaagcgccgggttaaagcagctggcatcccaaactgaatcgactttatatatggtgctccttgcgtcttatacattattgctttcaaaatacagcggccaggaagacataattgtcggcagtcctatagcgggaagaccgcacgccgatttggaaccgattatcggaatgtttgtgaatacattggccatgagaaattaccctgaaaaagggaagacgttctctcagtatctgtccgaggtgaaggagaatgcattaaaagcttatgagcatcaagattatccgttcgaagcgctgatcgatcaactgaatatcgcaagagacttaagccgtaatccattgtttgacaccatgtttgtgcttcaaaacacggagcaggaacagttagagataaatgacgtcactttcaaaccatatccaagcgaacatacgatggctaaatttgatttaaccttaacggctgtggaagaagagtcgggtattcagttcacaatggaatacttgacggctctgtttaaaccggaaacgatcgaacgcatgatggggcattttgtgcagctgattgattcgattattaaacagcctgatgccgagctggctcgtctgaatatgatgaccaaggaagaggaaggagacattcagcaactctttaacgatactgcagttgcggaaaaacgaattccgacaacgattcatcagctttttgagcagcaggctgagcttaacccggatcatgaagccgtcatgtttggaattcagacactgacttatcgtcagctgaatgagcgttccaatcagctggcgcgcatccttcaagataagggggcctgcactgatcaggttgttgccgttctcacggatcgctcagcacatatgatcatcggcattttagccatattaaaggccggcgcagcatttcttcctattgatccggagcttcccgaaaaacggcgggcttttatgctgaaagacagcggcgccggtgtgcttttgacttgtgcaggccacgctattccgccgcgctttgaaggagaagtgcttcagcttgatgatccgatgatatatcaaggcagagcagacaatcttaatctttcctgctcggaaaatgatttaatgtatgttatttacacgtcaggcacaacggggcagccgaaaggagttcagctggagcacaagacgatgacgaatctgctcgcttatgagcaggatcatacgcagcttcgctttgacagagtgctgcaatttgccgcgatgagctttgatgtctgctatcaagaaatgttctccgcgctttcaagcggaggaacactctttatcatcggcaatgaggcaaaacgtgacatacgtcagctcaatgattttgtcagaacgcacgggatacaaacagcattcctcccgacagcgttccttaagctccttgcctcagagaaacaatatttcgaaccgtttgccgcgtgcgtggatcacatcatcgctgcgggagaacagctcatcgtaacaagtatgctgcgtgacatgctggcacgccatcaagtcacattgcataatcattatggcccgtcggagacgcatgttgtgaccatgtataccgtcgatcctgatacagatcaggagcttcagccgatcggcaaaccgatttcaaatacggagattttcattttgaatgaagccggaacgcttcagcctgtcggaatcgtcggtgaactttgtatttcaggagcgagccttgccagaggctatcataacagggagcctttgacactcgaaacttttgttccgcacccatatgactcgaatcagcggatgtataaaacaggcgatctggcccgttaccttcctgacggaaacattgaatatgcgggaaggagagaccaccaggtcaaaatccgcggttaccggattgaactcggtgaggtggaggccgctcttctcaagcacgtacaggaagcagttgtcctatcaaaagaaaataccgatggccaaatcgatttatatgcctattttacagcggagcaatcactctcgatcagtcagctgaaagaaaaacttgctggccaaataccgggatacatgatcccttcatacttcatccagcttgagaaactgccgctaaccggcaatggaaaagtaaatcgaagagcattaccgatgcctgaagcaggtttacaaacgggaaccgactacgttgctccgcggacgaatatggaagagcagctgatatgcatctggcaagacgttttgaaggtaaaagaaataggtgtaaaagataactttttcgatttgggcggccactcgttgcgggggatgacgctcatcgccaaaattcataagcaattcagcaaaaacatttcattaagagaggtctttcaatgtccgacagttgaggaaatggcaaaggcaattgcaggagctgaaaccaacgggccggattacattccgaaagccaaagcaaaagatgtctatcctgtatcttccgtgcagaagatggtttacctgtcaacacaaatagaaggcggagaactgagctacaatatgccgggaatccttacattagaaggaaaactcgacataaatcgcttgcaaaccgctttccaaagactgatccagcgtcatgaatcactgcgtaccggttttgagctggtccgcggagaaccggtgcaggtgatcaaaccgcaagcggagttttcgatggaaagatacaaggcaacagctgacgaggttgaggaatgtttccgcaccttcgtgcggccgttcgatctcagccaggctccattactcagggccggactcatcgagttagaacaagacctgcatattttcatgtttgacatgcaccacatcatcacggacggcgcctccatgaatatttttgtcgaagaactgattcaattgtatgacggcaaagagttagctccgctccgtattcagtacaaagactttacggaatggaaacatcaaaaagagcaaagagaacgaatcaagaagcaggaagggtattggcttggtgtatttcatgaagagctgccttcatttgagctgccgaaagattttgcgagaccgccggttagaagctttgatgggaaaaggcacaattttacgctcgataagactgtcacccaagggataaagcagctggaagaattgaccgggacgacagcttacatgattttgttctcggcctattccatactgctggctaaatacagcggtcagggtgatatcgtcgtcggcacacctattgcggggagaccgcatgcggatttggaacccattatcggaatgtttgtcaatacattagccatccgcaccgctccgatggcggaaaagacatttttggattatataacggaaacgaaagaaaccatgctgaaggcttttgaacatcaagagtatccttttgaagaattagttgaaaaactgggtgtaaaacgggacttaagccgcaatccattgtttgatacgatgtttgtcctgcaaaatacggaacaaacggatattgaagtggactctctcgcagtcaggccttatgaacaaacagagacggcagccaagtttgatttacagctgaacttcttaatagatcaagatgagattcagggcagttttgattactgtacaaaactgtttaaaaagaaaaccattgctgtattggccaaggattacgtcatgatcctttcggcgattatgagaaacccatccattcctttaaaagacattcaattaagcgaaaaagtaaacaaaagtaaacatctcgcaagcacaatcgaattggatttctaatcacgggggcagcggctgtcccggcatgaatgccgcggctgccgccagctgcctgaaaacaggaatgaaaccaactggagggatatgaatgtcagaattcaaacaacaggagttgttctggggccgaatgtttcacacggaagaccgtcccggtgcattcccttcgtttcaagtgtccgactcaacagtaaagcgtgatataacaagcggatctgactgtattcacagttcattgagtgcggaggtatcacggcgcatcctgaccatgacgaaccaaacgccaatggccgtctatctggttctcctggtcggaattgaatcccttttatacaaatacacgggggatgagggagtgattacaggggttccagcctttgaagacgaaactgatgaagatcttcgttcagaccagctcatgttaatcaaacagcagatcaattccggcagtacgtttaaatcaattttccatgaattgaaacatacgctggacgaagcgatcttatatcaggacgttccctttgataaaatggccggacagctgaggctgaactacaatgcaaatcatttgccgatcatccatacagttgtttcactagagcaaattcattctgatggtttcatagaaacggctgctgcagatgctttatttcagtttgctatgggtgaagacttgattgacctaaaattatgttttaatgaacaagtctatgaccgtcagtatatgatgcaggtgctcggacatttaaaccggctattttctgtcatattatttcagcctgacctcccctcggccaagtggatattttgccagaatcggagacacatacacttctcgttgacattcaaactgcgaaaactgaatatccgcgggataagacggtttatcagttattcgaagaacagatgaaacgaacaccggatcaagcagccgttatttacggagaaaagcaattcacatatcgtcagctcaatgaacgtgccaatcaattagcccgaacgttaaggaaaaagggggtaaagacggaccggctcactgcgattatttgcgagcatgagatcgaactggtcgtgggaatattggccgttttaaaagcgggaggggcctatgtgccaattgatccggattatccgaagcatcgcatacagtatatagcagaagactcccaagctgatatcatcctgacgcagagccatcttcaaaaacagttggaacttgcgggcacaatggttttcctcgatcaggaaagctcttaccacgaagacggctctgacctggaaccgatcagcagtacgaaggatttggcttatgtcatttatacgtcaggctccacaggcaagcctaaaggagtggcaattgagcatcagggcttaaccaattatatttggtgggcccgccgggtctatgtcaaaggggaaaaaaccaactttcccctatattcgtccatcgcttttgatctgacgataacgtctgttttcactccgctaattacaggaaattccattattgtctacggaggagaaaacagtgctgccttgcttgattgcattattcaggattcaaggacggatattatcaagctgaccccggcgcacttgcagttattgaaagagatgaatatccctgctgagtgcaccattcggaaattcattgtcggcggtgacaatttaagcacgcggctcgcccgtagcatcagcggaaaattcggcggaaaaatcgaaatttttaacgaatacgggcctacagagacagtcgtcggctgtatgatttattcctttgatccgcaaaacgacagacgggaatcagtgccgatcggaaccgccgcggacaacatgaacattttcgtgctggataagagcatgaagccggtgccggccggcgttccgggagaaatctatatcagcggggacggcatcgccagaggatacttgaacagagcggaattaacagcagaaagatttttgcagcacccctttgtgccagaggtgaaaatgtaccggacgggagatttagcaaggcggctcccggatggaaatattgaatatttaggccggatcgaccaccaggtgaaaatccgcggttaccgcattgaaatcggggaagtcgaatccgcatttttccaaataccgccgattcaagaagctctcgttacggcacaagaaaccaacggggaaacatccttgtgcgcctattataccgcacagcattctttaaccgcaggcgaaattcgggagcgcctgtcccggcaacttccgtcctatatgatccctgcttattttgtacagctggcagcgatgccgcttacttccaacggaaaaatagatcgtcaggctctgcctgctccaacgggaaatctcactggaaatccttatacagctccgcggacagaactggaaaaaatactggccggggtgtgggaatcggtattaggcgcagaacaggtcggaatcgatgatcatttctttgagctgggaggagattcgattaagtcgattcaggtgacctcaagcttatatcaagccgggtataagcttgacatcaaacacttgttcaaacacccgacgatctccgggcttgctccttttattgagcccattacccgaatcgcagaacaaggggagatcaaaggccgtaccttattgacgccgattcagcattggtttttcgcccggcaataccctgatccgcatcattataatcaatctgtcatgctttattttaaagggggtttggacgaatcgaagcttcagaaagtcatgaagaagattgccgagcatcacgatgctttgcgcatggtctatgttcagggagatcatgaatacgaagccagaacccgcgggatcagtgaaggagaattattcagcctcgacgtgttctctttactcgaagaaaacaaccctgccgaaacgatagaaacgatagcaaatgacattcagcaatccatccatttagccgatggaccgctcatgaaactgggattgtttcaatgtcaggatggcgatcatttgctgattgcgattcatcatctggttgtagatggcgtatcgtggaggattttacttgaggatataacgtcagcttatgagcagctccaaaacggagaagcgctcacgctccctaagaagacggattcctatctgttatgggctgaacgattgaaacgttatgcagaaagtccggaatttgaagcagaaaatcaatattggcttgagcagaaacatatctcgcaacacaaattgccaaaggataatgagcaggagaccggtctggccgaagaccgggaaacgatcatcgtccaatggacagaggaagaaaccgagcatttattaaaaaaatcgaacagggcctatacgactgacattaatgatttattgctgaccggactcggaatggctgttcatcgctggacggggcatgaagaaattcatgttcatctggaaggacacggcagggaatctatttttcaagacgttgatatttcacgtacagtgggctggttcacaacccaatacccggtttctcttcaaatccaggcagaccgggacatctcccagcggattaggacggtgaaagaacagctgcgtcagattccccaaaaaggaataggatatggcctgatgaaatattcgtccgatcatccgaaggcatcagaatggaccggacatccggaaatcagcttcaattacctcggacaatttgatcaagatctcgaaaatggaggaatcgaagtatctccttactccggagggaaaattgcaagcgacagacatcccattgcctatacgcttgacattaacggcatgatctcagacggccggctgtcattggccatcagttacagcggtaaacaatatcgaagagaaacgatggaaacatgtgcagctctcttaaagaacagcctaaaagaagtcatcgaacattgcgcagctcaagaagacattcacctgacgccaagcgatatctcactgaaggacataacaatcgaggaattagatcaatttgttcagcaaacacaacatatcggcgagattgaaaatatatatccattaactcccatgcagaaaggtatgctgttccatagtttaatcgattcggcttccagagcttactttgaacaagccgtttttgatctcaaaggcggcttggatatcgaggcatttacaatgagtttgtcgcagctggcggaaagacatgagattctccggactcatttttatacggaatggaaagatcagcctttgcagatcgtattccgaaaaaaaccgatcgaaataactgttgaagatattcgaagcatgaagaataaacaacgaaacgagttcattgccggctttgtacaaaaagataaggcaagaggattcgaccttatccaagatgcattaatgcgcgtatcaatccttcgtacagaggatgaccaagtccgattgatatggagcttccatcatattttaatggatggctggtgtctgcctcttattacgaatgaagtatttgaaacctattatgcgattcttgatagaagaaaagcggagcgggaagtcgtcaccccgtacagccgatatatcgaatggctggaagaccaggatcataagcacgcttcagcctattggcaaaaatatttggacggttatgaaggacaaactgttttactgaaagaacctgtctcaaaccaagccaagggatatcaaaaacaaaggcttgcatgccggctcggaaaacagctgtcagaagaaatcagacagactgcaagcaagcatcacgtcaccgtgaatacgttcattcaaagtgcgtggggactattgctgcaaaggtacaacaacagtcaggatgtcgttttcgggtcggttgtatccggccgcccggcagaaattccgggtatcgagtccatggtcggcttatttatcaacaccattcccgtccgtattaccgctcagcctggaatgactgtggaacaagtgttgaaaatgagccaggagcaggcattggcttctcaagggtatgatacatttccgttatatgaaattcaggctcaaactgaacaaaagcagcagctgatcagtcatatcatggtatttgaaaattatccggtcgagaaacaaatggagcatatgaaaccgaatcgtgacgcactggacattatcaatttccatatggaagagcatacccattacgatttcaatttcattgtcatgcccgcgggagaaatcgacattcattttgtatacaatagcaacgtctatgatcatgcaagtgtcaagcggatggaagagcattttatgcaaatcattaagcagatggtgaacagtcaggcgattcgcgtccaagacttggatatacttacgggggatgaacgttcgctccttatagaggcatttaatgatacggaagcagattatccaaaggaaaagacgcttcataaattgtttgaggaacaagcacagcgtacgcctgatcaaacggctgtcgtatacggggaaagccagctgacataccgggaactgaatgaaagagccaatcaacttgcccggacattgcaatcagaaggcgtgcagccggatcagccggtcgggattatggccgaacgttccttggaaatgatcgtaggactcttcggaatcttaaaagccggcggcgcgtatgtgccgatcgatccgagctatccggaagaacggattcactatatattggaggattcggatacgaagctgttgttagtacagagtcacttgaggaaaagcgtgccttttacgggaaaagtgcttgacctggaagatccgcgattctcttgggaagatggttcaaacttgaaacagactgccggaccgaatcacttagcttatgttatctatacttcgggatcaacaggccgaccgaaaggggttatggtggaacaccgatccgtaatcaaccgtctcgtttggatgcagaaacattacccgctggataagcaggatgtcattctgcaaaaaaccccaatcacctttgatgtatcggtgtgggaattgttctggtggtcgatgactggttctaaagcggtattgcttccaaacggaggagaaaagaaccctgacgtcatcttagatacgattgcgcagaaaaatgtcaccattatgcattttgtgcctgcgatgctgcatgcttttcttgagtccatggagcaaaaatccgacgaggaattaaagagaaagctggcatcattaaaatatgtatttgcaagcggcgaggctttgacgcctgcgcacgttgcggggtttcatcgcttgatcacaccggcgggtgaggctcaaatcatcaatttatacgggccgaccgaagcgacgatcgatgtatcgtattttgaatgcgaagcgggagaaacgcttaactcagttccgataggtaaaccgatttccaacattcaattgtatatcgtacaccccgaatcggaatattttcaaccgctcggtgtggcaggagagctgtgtatcgccggagacgggctcgcacggggctatttgaaccgcccggagctgacggctgagaagtttgcagctcacccatatgaagcagggaagctgatgtaccgtacaggcgacttggcaagatggctgcctgacggcaatatcgagtatttgggaagaattgatcatcaagtgaaaatccgaggctaccggatagaactcggcgagatcgaagcatctttactacaactcgatgctgtcaaagaagcggtcgtcatcgcgattgaaaaagagggctcaaaacagctgtgcgcttacttgtcaggagacgagtcattaaatacggcgcagctgaagcgtcatttgctgaacaatctgcctacgtatatgattccggcttattttgtacaagtagagaatatgccgataaccgctaatggaaaaatcgatcgaaaagcgttgccggctcctgagggaaataggcttaccggaaccgaatacgcagcgccaggaacgttaattgaaaagcagctggccgatatatggaaggatattttagctctgcctgaccccgggattaaagatcacttctttgacgttggcggccattcacttaaagtattgcagctcattcatcaaattaacgccagtatgggaatcaacatgcattatcaagccgtatacgattttcctaccatcgaaacaatggcacgcgccattcaagcggccgttttcgaatccgagacggataacgtattcgtcaagctgaatcaggaagattcaatccctgtgttctgtttcccgcctttaatcgggtatggactcgtttataatgaaatggcgaaaagacttgacggcgtcagcaccatctatgccgctgatttcttagaagagccgtctcatgggaaagagatcgttgaccggtatgcagaaagcatgataagcattcaagaacaagggccttttgttctgcttggttactcttccggatcgaatttggcttttgaggttgccaaagccttagaaaagcgggggcgcaccgtatctgatgtgattatgctggattctaaaatcaccgattcggtaactcatttatcggaagaggaaatccaagagatcgtccatctgaatatggacattattccggactactacagagaaatattaaccattccttcgattaaggataaaatcagaggctatcttgcgtatcacaatgaactgatcaattccggcgccgttaacgccaacatccatcatttgctatgcggcgatgtaaccgatgataggggctggacacaatcaacagcacagcattatcttgagtacaaattaaaaggagatcacgtgacgatctttgaacctcacaatatcgaagaaaatacggatgcaattcgatctattattaaacggattgaagaacggcatcatcacggacttgttcttgaagaacaactgtcaataggatcgtttgctggcgacacgaagtttgacaaaatgtaagtgatcaagtgtaaaacgccgctggcctggcactcagcggcgttttttattaaaaaggcgagagtcatactcctgtgttcgcaaggcttactccagagccgttctccatgactggttgtcatcaaatggtaaaaaaatcatcatacattttaaggaaaaagaaggatgtcaagttattagaaaaaagtgtagcgtatgtttatgggtactagctctattattgagttgcttaactgcggagtctgctttttactgccggtactgcaatttggtctcaaatggtaaaagttccccgaatttaaagaaaaaggaggagtgttaagttatgtgtaaaaaatgttgcgtatgcctatgggtccttgctttattattgagttgcttcactgggaagtctgcgtatgctgccagcactccaattgcaaaacatgttgggaattcaaatccgcttatcgaccatcatctgggcgcggatccgtttgcgctgacctataacggaagagtctatatctatatgtcaagcgatgactatgaatataatagcgacggcacgattaaggataattcatttgccaatttgaataaaatatccgtcatatcttcagcggatatggtgaactggacagatcacggagcgattcccgcagcgggtgccaatggggtgaatggcggccgggggattgccaaatgggcaggagcatcatgggccccgtcagccgcggtgaaaaagatcaacggtaaggataaatttttcctttatttcgcaaacggcggcggaggtatcggggttctcaccgcagacagcccgaccggtccgtggacagatccgatcggaaaaccgctggtgacgccaagtacaccaggaatgtccggtgttgtatggctttttgatccggcagtattcgtagatgatgacggtaccggttacctatatgccggcggaggcgttccgggcggttcaaatccaacgcagggacaatgggccaatcctaaaacagcaagagtcatgaaattagggcctgatatgaccagtgttgccggaagtgcatctacgattgatgcgccttttatgtttgaagattcgggaatgcataagtataacggaaaatattactattcctattgtatcaatttcgggggcgcgcacccggccgataaacctccaggtgagatcggctatatgaccagctcaagtcctatgaattctttttcgtatagagggcactttctgaaaaatccgggagcatttttcggaggcggcggaaacaatcaccatgctgtttttaattttaaaaacgagtggtatgtggtgtatcatactcaaactgtcagctccgctctttacggggccggcaaaggataccgttctccccatataaataagcttgtgcataatccagatggctccctgcaagaggtagcggcaaattttgcaggtgtcaaacagctatccaacttgaatccatataaccgggtagaagcggaaacgtttgcctggaacggacggattttgacagaggcatcctcagcacccggcgggccggtcaataatcaacatgtcacaaacattcataacggagactggattgctgtaggaaatgcagatttcgggtcaggcggtgccaggacgtttaaagcaaatgtagcgtccgctctcggcggaaaaatagaagtgcgactagacagtgcaaacggtaagcttgtcggaaccttgaatgtcccttccacaggcggaacgcaatcctggagagaaatagaaactgcggtaagcggcgcatccggtgttcacaacgtattctttgtatttaccggaactggtacaggaaacttgtttaatgttgattactggcagtttacacaaagataagcaaaggtacgttttctaagtctataaaagataaatgaaggagaggaaaaaatgatgtcgagcgtaaaaaaaccaatttgtgtattattggtatgtttcacaatgctgtccgtcatgctgttaggaccgggagttactgaagtttcagcagcaagtgatgcaacagttaatatatctgcagaaagacaagtgattcgcggttttggaggaatgaatcacccggcttggattggagacttgactgcggctcaacgggagaccgcttttggcaatggacagaatcagttaggtttttcggtcttaagaattcatgtagatgagaatagaaataattggtacaaggaagtggagactgcaaagagtgcgatcaaacacggagcaatcgtttttgcttccccttggaatccgccaaacgatatggttgagactttcaatcataatggtgacacatcagctaagcggctgagatacgataagtacgccgcatacgcacagcatcttaacgatttcgttaatttcatgaagagtaatggtgtgaatctgtatgcgatttctatgcagaacgagcctgattacgctcacgaatggacatggtggacgcctcaagaaatcctgcgtttcatgagagagaatgccggttccattaatgcccgtgtgattgcgccggaatcatttcaatacctgaaaaatatatcggaccccattttgaacgatccgcaggcgcttaggaatatggatatcctcggaacccacctgtacggcactcaggtcagtcagtttccttatcctcttttcaaacaaaaaggagcggggaaggacctttggatgacggaagtatactatccgaacagtgataacaactcggcggatcgatggcctgaggctttaggtgtttcagagcatattcatcattcaatggtagagggagattttcaagcttatgtgtggtggtacatccgcagatcatacggcccgatgaaagaagatgggacgatcagcaaacgcggatacaatatggctcatttctcaaaatttgtgcgccctggctatgtaaggattgatgcaacgaaaaatcctgaaccgaatgtttacgtgtcagcctataaaggagacaataaagtcgtgattgttgccattaataaaaataacacaggggtcaaccaaaacttcgtgttgcagaatgggtctgcttcgcaagtatccagatggatcacgagcagcagcagcaatcttcaacctggaacggatctcaaagtaacggataatcatttttgggcccatctgccggctcaaagcgtgacaacatttgttgtaaagcgttaaaggcatcagcattgcattaagccaattttcttactcggaaaagaaaattggcttattttctgtgggagagaatgttgattttttaacgatacacggacattgggtataataatgacaatgacttcaaggagtgatcaatatatgtcacggcttcacagcaaagtattaatcatagacgatgaaaaagaaattttggaactgatcaaaaccgtattaataagagaaggcattgatcgcgtagtgaccgcttcaactgcccgtgacggattggctcaatttcatcaagaaaatcccgatcttgtgatattggatatcatgctgccagacggtgaaggctatgatatctgcaagcaaataagggacatttcacacattcctattatctttttgtctgcaaagggggaggaaacggataaaattgtaggacttgccatcggcggggacgactacattacaaaacctttcagccctaaagaagtcgcataccgggtcaaagcgcagctgagacgggtctcttacttacagccttctcaaaccggaaccgtgataaaaaaagggccatttgaattaaaccaacaacaagccgagctcaccaaaaatgaagcggctattgagctaacacctaaagaacttatgcttatggcctattttctgcagcatcccaatcgggtgatcagtaaagaaacactctatcaagctgtatggggagaagactttttcggttctgacaacacggtgatggttcatatacgcaggctccgtgagaaaatagaaactgtcccatcaaaaccagactttctcgtcactgtgaaagggttaggctacaaatttgttgtaaaggatgcgtaaggatgaattggcgattaacaggcagatacatggtatctgtcatcatagtgaccatcattacagtcttcattaatttatttatttttatgttttggctcgttttacaggcgaacagccaacatgacgaagaaagtacacctgaaactttcacaagatcattcggacaatatgtcacgttatcgaacaagggtatcacagtaaacaaagagggccaaaaagctttaaaagagcagaatgcatggattcaaatattagatgaaaacggacaggatgtttatcatgatagagaacctaaaggactgaagaaaaaatatacgcctattgaaattgtaaatttacataaatataaggatgaacaattattatcaaccatttacgccggcggaaaaaaagtaaacggcaaggagtacagttactttatagggtttaaaaatccctctctcggaaaatttgtcctctcatatgataccaaggaatttgtgacgaagttcaatacaggaaccatcatattattatcaatagatgcattgatcgcgttactcattggctatctattcagccggcagctcacaaaaccgctcggccgtgtcattcaaggaatccagcggttagctaatggagattatacgatcaaaatgaaatccaaaggcatttataaagatgtgttctataatgtcaatcacttatcggaacaactatctttaagcaaaaaagaaaaagataaattagagcaaatgcgtgaagagtggatcagtcatatttctcatgacattaaaacaccattagcatctattcaaggctatgcagaaatcatcaaagatccgaattatcatctcacagtcgaacagatcagagattacgcccggatcattgagagtaaatcgctctatatgaaagatgtgatggaagatttaaatttaacgacaaggctgaaaaacaacgatgtgatgttaaataaagaacgggtaaaccttgtatcgctgctgcgggaaacgttaattgatattttaaacgattcgagatatgcggataagtccattgagcttcaaacgaacctggaaaaactgatgctgaaccttgatgcgatattgattcggagagcggtcacgaatctcattttaaatgccctcgttcacaatgatcccgatgtgaagatcgttgtacagcttgaacaaaaagaacgaactcatgtgacaattaaggacaacggcaaagggatagaagaagaggagctggaaaaagtgtttgatcgctattacagggggacaaatacaggaacgacgcatgcaggctctggtcttggaatggccatagcaaaggatattatccaaaagcacggaggggacatcaccattcacagcaccgcgggagaagggacaacgatagatatacaattatcataatggctatacaaaaaaaacggttctgctgattaataacagaaccgttttttcctattgttccgaaaacactttgattcctttgacaatgttccaaatgaaaaaatagatcgccacaaggaatgtaacagcataagtcgcaagcaggaaaggcccggcatgtctgatatcattcataccaagtaaacctgaagcgatgatgccaattccaaaaatcaaataaggaatcagatgcgtccacaaagattttttcgcatgttctttcacatcgtcccggcttaagaaatagacgataatcggaaacagaaacggcgcaaaaaatatactgaagtaacataatgaagacaaaattttattttctctcaaaccttttcacctctatgatttattgaagggggaattcttctggctgaatcccacactgaagtacaatcttattgtacaactccaaccttaacccgtattaatccgaaccttacatcaaccttaaattaacaaggacgggcaagggctcgtcttcttacagcaatcataagattcaatgccatattgagactcatcacattacatttagagcgtctacgtcggaaatacatttaatttttcgattcgattgaaaaataacgtgtaaagtcccgattcagtccagttttctttgttctatatgtgtcaggtgtgtcttattcaatagagttagagcaaattgacaggcttttaaacctcccaaaaacaagaaattaggttgatagacaatcatgagaaagatttttacaatgagttcgagctcataagaagtgaagagccaaaataatgcgaaggaggaaaagatcagatatgaaacggtcaatttctatttttattacgtgtttattgattacagtattgacaatgggcggcttgcaggcttcccaggcatctgcagcagggacaaaaacgccagcagccaagaatgggcagcttagcataaaaggaacacagctcgtaaaccgggacggcaaagcggtacaattgaaagggatcagttcacatggattgcaatggtatggcgattttgtcaataaagacagcttaaaatggctgagagacgattggggcataaccgttttccgcgcggcgatgtatacggcagatggcggttatattgataatccgtccgtgaaaaataaagtaaaagaagcggttgaagcggcaaaagaacttgggatatatgtcatcattgactggcatatcttaaatgacggcaacccaaaccaacataaagagaaggcaaaagaattttttaaggaaatgtcaagtctttacggaaacacgccaaacgtcatttatgaaattgcaaacgaaccaaacggtgatgtgaactggaagcgtgatattaaaccgtatgcggaagaagtgatttccgttatccgcaaaaatgatccagacaacatcatcattgtcggaaccggtacatggagccaagatgtgaatgatgcagccgatgatcagctaaaagatgcaaacgtcatgtacgcgcttcatttttatgccggcacacacggccaatctttacgggataaagcaaactatgcactcagtaaaggagcgcctattttcgtgacggaatggggaacaagcgacgcgtctggaaatggcggtgtattccttgaccagtcgcgggaatggctgaattatctcgacagcaagaacatcagctgggtgaactggaatctttctgataagcaggaatcatcctcagcgttaaagccgggagcatctaaaacaggcggctggccgcttacagatttaactgcttcaggaacattcgtaagagaaaacattctcggcaacaaagattcaacgaaagaacgccctgaaacgccagcacaagataaccccgcacaggaaaacggcatttctgtacaatacaaagcaggggatggggtgtgaacagcaaccaaatccgcccgcagcttcacataaaaaataacggcaatgcgacggttgatttaaaagatgtcactgcccgttactggtataacgcgaaaaacaagggccaaaactttgactgtgactacgcgcagattggatgcggcaatctgacccacaaatttgtgacgctgcataaacctaagcaaggtgcagatacctatctggaactgggttttaaaacaggaacgctgtcaccgggagcaagcacagggaatattcagcttcgtcttcacaatgatgactggagtaattatgcacaaagcgacgattattcctttttccaatcaaatacatttaaaacaacgaaaaaaatcacattatatcatcaaggaaaactgatttggggaacagaacccaattagttaagctttaggcggacatcagcaacgatgtccgcttttatcatcttaaacagcaatacatggaggtttacgtgaagaagtagatatgactgtacatataatgtaatcgtttcacagttttgaaaagcgtttatagcgcaatgtatgtattttacacccgccacttttattacttaagggggaacaagagaatgaaaaggtatgacgcatttccagagccaaccggcggctatactgtcggccgcacacaactggattttgagtacacggcatcagatcatacaaaaagagaactgacggtgtttgtgtactatccgtccgacagcagcgaagggaagactacatcaacgtacatgtttcctgaagtctgcgaaatgcttgatgagcagccgcttctcactgcgcggaagaatgcttactctatagatatcaagacccaatgttacgacggccttgctctctccgggaaggaaaaacgctatccggtgttattctatgtttgcggcgggggcggttctccagaatggggcacagtgatctgtacagacttggcaagcgtgggatatgtggtggtaagcatcggccatcagaatagcacgatgtataagcgtaaagatgggcgcccgtttaatgtatcaaaggattttacgtagaggttttttaatattaccttacaaaaaggggatgctgttagaatatggacccacttatatattctcttcacaatttctagtttacataatatatattctaggaagttatacagagaaatgaattacaagtctcataaaccaagtatactttagttattgagacaaagaagagaaatttataactgcaataaatgtttacagcgctagttttgattcagctgaaaaacctaacgcaaaagcaagcttgaaatgaatttcttgtttggtcattacccgcaatgagatcatttctttaggcaagcatataaaaaatcaggtctgataatactttgccgcatcttccctgcttttttccgcgtaatcataaacaaaaagaacaagattttcagcagggccatctgcccggctgccttcatcataccgctcaatgtaggaatctttgcagccgttttcatttcacgaatcgtgagagacaggcaaagaccgcaagaccgaggccgctcccggtccaaaacgacaaaaaactttctccataagataaacgtgacaatgagaaaaagcaccttgtctttcgtaacgcatcacatcctctaatatgaattgacttccgggtgcattatcttcttcctatctattcatataatgagaaaaagccgcctgataaacagacggctctgcagcttattatttgcttcggttacctgcggaagcatgagtgatccgataatgcacagttaaaaatttcagtccgaacagccacatatgatgaacggccttcaggcttgtttcgctctgggctgaaataagaaatgtctctgccagcggaagatgacacgtcccccatttcgtctggagataaatcccttcatcacccgctccgctttttcgccgtctgcttgtcaaaacaagattctgcttacgcgcataaggctttaaaatgcccgtcatttggccgtacggcagaggaagagagatattcatgtatccttccccttttgacctgtatgctgaatacagcgcagtaaaaacggtttcctgcttttcatttgttctgatccatgcacggacattttttctgccgtctttatcagagtcaactcctataatatcactgtgcatgatataccaatccggattcatggacagatgaatctgtcccgctcttctgctgaacggctcgtacacgcgcgcgaacggacgaaaccaaccgctccacgtcactttcgccatgatgtcataatcaattgtcttttcataaaaggaaataacggccggcgccagcttttcagttgaaaagtcttcagaatgcagttctctcagctgatcctgaaggccggtataatggatgtcatttgctgcatgaatgtcagtcaaaaaatctttgcctatcgttcccttcccgtaaattctgctgaacgttctttcactgttctcatcgaacggtctaggattttctattctccaccccgccaaagccggcaggataacgccaaatgcattgacggccccgtgaatccaaatcatctggctgatcgtgagcgttgcctcctcgcggtagacaccgtacgaatatatcaaagaaaaagcaattgtgatcattaacacagccgaagaactcctgatcaagatcctgcctgttttcgtaacaaacggcgccttaaagacgagatatgcatttacatacagacccgcaagatacagagcgacagcaatcacatcaagtgtctttgaaaatgtaatccccaaggcaattaggaccggcgaaatcaaaataatgactgtgctccaccggtaaagtccgcgtttctcccgtatgatcctgccgagcaatccgttaaagatcggaatgagaaaagcggaatagtgaaagtgcaccgccgtcagcagaacgataagcgggccgaaattcaggacgggaatctcaaggacatatgcgaagaaccagaatccgcccccggccaaataaatgaaacccgccataactgacatctcttctgttctgtgaatatttgttttcatcagccggcggacagcatacagtgccagtccaagcgtataaatgaaccacacaaaggcaaaaaagctgaagcctgtgacaagcgcaagcgccgcacatatagcggcaacaggataactccgtaaccacacattctctaaggtctttgacggccgaaaagcaaagcagaatacagcgggaacgaaaaaaagcacggaaaataaaacaaacgtctcagcagctgatatatgcggagcttcagccgccgcaaatcccaaaaagcaaaccacgcttaccatgagatgacgcttcagcatgtttctccctctgtttcccggaaagtcccccggtaagagaaaagcgtgccgagtatccggtttttcacatgaacctttatgctgaagcaattcatttcctcatcataagcctcataaacggttgaattcccgcacagccatgccggaatcgggattttctttccgcctatcaggagccactgccttccggatgtaataacaagccctccgtctgaagacgcttctaaatgcagttcagacagtaggatgtgaggtttgccgaagtaatcaagaattctgttttcccgctcatcatattccatgaccgcatcaaaaaaacgcgttttgcctttaaagaaaaaggtacgattccattccacgccattttgcctgtttttgttttcgatagtaaaagggatatcgtttcccctctctgagaaaaaacatctgaaaaaaacaccggtctttaaaagcattctgacaagaaaagaacctccctttatttctgacataacgccttctccgcaaaacgtgcgtgatccgtcaaatctgtaccgtttctgcagcatcgggtgcagtgattgataatgagtaatcgttttttcatacattgaatccgtcatttcacttctctctttcgttttgtatgccaggcgctcggcagcttgagcttaagaatcatgccggctatcgtaaggactcctaatgaaatcaagaatccgccgccggaatataacagtgccgttacacaaaagaagactgactgcccggcgtgaatcagccactttctccgcatgggaagcagccataatacccctaaccctgtctccagcgttcccctcacgatctctgcatcggcacagccatcatgaaagccttgaaaaaaccaatacagactgaatacgaggcacatacagacatagacaaatccgaaacggaccgatatcttcggatgtctgttttgttctatccaaagccgcaacgcatcaaagctccatgcggtagcccagcttagcagaggacgaaataaaaaccggtctatccaacttcccggcagaccgcgggccgtttcatattgatattgagtcaaaaatgaggtttgtccgttatcccgctctgtatacttccagtagcccctgccttcttttataagtgacagcggatgatcagaggcaaaagcgagcgaagacactctttctgacaagcgaggccttatgtcacctattgattcgcccgtgccggataccttcagcccaaaaccgattcgtgtttcatatagaaatctctgcggttcatctggcagcctatgaagatatgtaatgtcagaaaaacgcagatcccattctttatgaagatgcgggttttgcgtatattcccaaagcgtttctatatcagatgcaatattgatttcgacatatatcggcttctgtttcatgctccctcctcttcccttcttttgtaaacaattcctatattatcataggaacagatcaagcgggagaacgaaaaggccatcccgttatcggcaggacagcctcagtggctttgatgacttatgaataaggtatcgtgtcttttttatcttcagaaactgtttgaatgataatcggacgcacaaaacggattaccgcagccgaggccaaaacagctaatccgcctgcaagcaaaaacgcccccgagaatgatccgcttttatccgcgataaagccggttaaagcaggcccgataataccggccgtgtttgcaagaaaatgcataaagccgccgactgacccgacattcctttgatcaaccacatcgtgaatcaccgcccaatagatagagcccgttatatataaaaagaagactgataaagcaacgagaataacggcacttacggcagtggtaacaagtccggcaaatccgatcagtacagcggaagcgaacaggcaagtgacaagaatgactttccgtgagaacaaaaccccttttccggcggtttttttgtatacataatcagaaatcattccgcctgccgccaaaccgataaatccaagaatccagggaataacagtcaccacgctcataaattcaatacttaatccgcgttctttcaccagatagctcggaaaccatgttaagaagaaaaataagatgtaattgtaggcgaaaaaggcaaaagccgtgaagagaaccgttttttgttttaaataaaaggtcatcgggatatgctgctcatgcgattgaaccgccgctttcattgccggggtgtcttccgtctgtgccggccgttctttgacaaatttaaaccagataaacgcccagactaaaccgacgatcatgatcaggacaaaggaaaccttccagctgaatgccacagcaatcatcccgacaatcgggccggaaatcgctccgccgagcggcgtgccgctgtttgtcaggccgatgaccgtggcgcgctgagacggaggaaaccaattgttgaccattttgcttatggcagccgacagcggcccctcgcccataccgaataaaacacggataatcaaaagacttacaaatccgaaagcaagcgcaaccgccccgctgaaaagagaccaaacgatcatcgccgtacacaatgtcaatttagccccgtaccggtcagatgcaacaccgccaaggaagttacacacagcgtatccgacagaaaaactgctgaaaatcagccccatttgggttgcagacaatgtgagatcctgctgtatgaacggcgccgcaatagacagcgctgaacggtctaaatagttaatcaccccggctgaaaataaaagaagaagaatagggaatctatcctttgagaacataaaatccctccctcttatttcataatttaaattgccggagtaaaccggtttatgtaatgaaaccggttatccggattgccttgccagaagcgccggtttatagcggtgaatccgtttttcaccgctatctttttcttgtatctggcaaagaagaaggcttcccgcttttcgcgccatttctgccgcaggctggacgatcgtcgtaatcggaggagtaaaaaaacccgcaaaaggaacttcatcaattccgatgacggctgccttatccgggattgtcatatcatgctccttcatatacttcagcacctcaacaagaacgatatcgtttgccgccaatatcgctttcggaggctcctgaagtgagaacagctctgacaaaacattggaaatatcagccgcatcggctgttttgatatattcgttccgcaccatcatcccgtgggggtcaagcgcctttttatacccttcaatccgctctaccctcggactgatttcccgaataatggacgtcgtaataatcgcgattctcttaatgccgctctcgataaaccggtcaacggcaagaccggctgcatgatggttatcaagcatcactgtcggaatcccgagttcttcaatggttctgtccataaacacgaccggaaacgtatcgcgtttcatcttttcatataaggagagattttcgcccgtcggaaaaataataattccgtccacctgcttggccctgagcatttcaatatatttcttttctttttccggttcatcatccgcattgcagacaataatatgaaatccttgttcatgaaaatagtcttccaccgccctgatgacctgagtggaaaaggtgtgaagaatattagccaccaccacacctaccgtaaatgttgatttctgttttaagctgcgggcgacgaaattcggctgatagttcagctcatgaatggccgcttctattttttgtttcgttttctcgctcatatagtcatagcgctgatttaaaaattgagatacggtgcttttagatacgtttgcatatttcgccacatcagaaattgtaatggttttcatagactcatccccgtctgtcttcatttttcactagtataagtcagaagtaaatagtttacaatctgacagggaactggattctgtcacactcccgaataagccataaaacctccgtcgacgggaacggtgaccccggtgataaagcctgagtatgaatcatccgaaagccacaggagcgttcccagaaggtcttccggtttcccgaaacgtttcatcggtgtatgtgccataatcttattggatcggtctgtcagacttccatcttcctgtaataacaactcacggttttgcgcagtcaaaaagaaacccggagcgatggcattcacccgcagcccttttttcgcgaaatgaacagccatccacatcgtaaaattctgaaccgccgccttagccgcactgtaggcaggcacctttgtcatcggtgtatacgcactcatagaagaaatattaataatcgcgggacattccgccttcaaaaggtcttttccaaacacttgcgatgccagaaatgcaccggtaaagttgcttgaaaatacgctggaaaatcccgtttcgtccatatcaaaaaatgatgggctctgctcatcctcttcatacgtctcattggcagtgatcgcatcagcgtggtttcccccggctccgttaattaaaagattgacagagccgaaccggctgataatctcgtcttttgccttttcgagcgaatcacgggctgaaacatcagccggtacagaaaccgcggttcctccagcatcagcaatctcgcccgccgcacgctctgctttatcagcattccggctgacgatcgcaattttcatcccctgccgtgaaagctcctttgccattgctgaacagagaacaccgctcccgcctgttatgacagcggttcttcctgataaacgtccatgaatcggtctcatctcttcacctctttctcatgagacgagaacgcatcccacagtccgctcaagtacataattcctaaggcacgatcatataaaccatagcccggccggcattgttcgccccagatatgacggccgtgatcaggccgtacatatcctttgtagccttggccgtgcaattcttttaccacaccgataatatcaatggacccatcactggtaagatgcgaagtttccgtaaaatcaccgttatcgcagattttcacatttcgtatatgggcaaacggcgcagctcccgcatagtgtttggcgatcttcaccatatcattggcgggatccgctcccatcgaacccgtgcacaacgtaatacagttggcgggtgaatctgaaatctctcgcagcttttcataacttttctcaccggtgataatacggggcaggccaaaaattgaccaaggcggatcatccggatgaatggccatttgaatgccgtgttcctccgctacaggaaggatttcatgtaaaaagaattctagattggcccaaagctgtttttcaccgaccgtttgataggcttcaaacagttccttgatccgggccattttctccggctcccacccgggaagcgtcaaatcagaagattcttcaaccgtgcggatcagttcttctggagggagactttccactttcgctttttcaaaaaacaaagcagttgacccatcctccagtgcgcggaacatatcagtacgcgtccagtcaaaaatcggcatgaaattgtaacagatgactttcacgccgaattcggacagattgcgaatggtctgtttatagtgctcaatatattgtccgcgttcttcatggccgagtttaatggcttcatgaacattcacgctttccacgacctctgcatgaaacccataggattgaatgaatctgacttcggcttcaatgtcctccttttcccatacttcgcccgcgggcttctggtgaagagcccagacgatgcctttgaccccgggaatttgtctgacatgttcaagcgtcaccgtatcattaccttggccgtaccagcgaaacgtgatattcatgttacacccccgtatattcgttttttcggcagacgtattctttgctgagggatacggcagcttcatagccgcccttttgatatgcttttgtcaagtcgcttcccactccgaccgcgaccgctccggcagaaagccagtcattcatgctgtttaatgagatacccccggtcggcataatgcggacattcggcagagggccgttgaccgacttgataaatgagggattaaacgaattagcggggaacagctttaccacatcacatccggcttcgagcgccaaagccatatcagacacgctcatgcatcccggaagatacggtacgctgtactggttgcatagagatgctatctcttttacaaaatgagagctgacgataaatgaggcgcctgataaaatggcgtgtctcgctgtttcggtatccattacagaaccggctccaagaagaatatcttgatgccggagttccttaaagacatcttccacttcaggagttgtgtatgtaagctcaatggcgctgatacctcctgaaatggccgcttttgaaacttcaagcgcctcttggctgttttgtccccttatgacagccaccacttgtgcatgcagaagtttttcgtaaatggcgtacttaggcagcattctcgctcctcctttaatcaaacgtaatgattgcttttcccaccttgcccgggtgctgttcgatcaactgaaatgctcgatggacgtcatctgctgaaaatgtatgtgtaataagaccgccgtgcgttaacaggcctttattcagtaagtctgtaatgtacggaaactgattcgtctgcaatcttgaaccggtgatcgtgacttccttttttgtgatcggaagctgagaaatgccggcagtcctctcatcaaaaccaagcacaaccacatgaccggccggagacactgcgtcaattgacgtttcaaacgttgaggggagacagacggcatcaatgacgacattagcgccttcattttttgtccattcgttcacccgcaaaacgggatcttctttttgcgcgttgacggtaacatccgcaccgtttttttcagcgaaggccaagcgttcatcattcaagtcggttatcatgacggaagcgcctttgaactttgccatttttaatatgcagattccgatcggccccgctccttgaatcaaaacggtatcttccttctcgacacggcctctccaaacggcctgggcgccgatcgtatatggttctgccatgaccgcttcctcccagggtagatcgggcgaaacagcatacagctgcttttccggaagcacgatatattcccgcatcccgccatcttcatgaacgccgaacaccgaaagcgctttgcagacgttcggacgtcctttccggcaggcatagcatgttccgcaataagatatcggttcaatcactacccggtcacccggcttgaaacgccggacatgagaaccggtctttgcgacttcccctgtgacttcatgtccgattactctcggcagggacgctaacggatttgtcccatgataaatatgcaaatctgatccgcaaattccgacccgattcaccttgacaagaacatcatccgcgtggacaacagacggtttctcacattccgtcaccatcagatcaaatgctttccgtacttgaaccgctttcattttttcacccgctttttaagttgtgcttgctaccgttcaatcacagtctctttgtttacaaatgacagaacctcttctaggcagggaagcccttcattgtcaccggaaactgtggtgacgagcgcaccgactgcatttgcaaactccagacgtttttccggttcaaaaccatgtagataactgtacaggtagccggcattaaagccgtcacccgctcctaccgtgtcgacaggcgcaaccgggaaagcctctttgtgaacccacttatgatcatgatacagcgcagaacccgcttcaccgtcttttatgacaagctgactgattgaatagctctctgcaaaccgggctaatgcttcattttctcctatacctgtcagctgtttcatttcgtcccggcccgccagaagaatatcagtatgcggaaagatttgatgaaatgccgcacgtgcctcctcaatcgtccacagcttcagcctgatattcggatcaaaagatacgggaatctttcttgctttggcgatggaaagcaccctttcagcaatttcaagatttttcttaccaagcgcgaggaacacaccggtaagatgaacgatgtgaatgccgtcaaacatattctcagttatatcttccggtgcaagagtcagaattggtgaattgaaacgataataaaacgtcttgcctgaaccgtcatttctgatctctttgacatttaaagatgtaggaaagccttcaacaaaggagacgtcagtcacatcaattccttctcctttggcaaactgataaatcactctgccgaactcatccttccccagtctgctgacccactttgagtgcaggttcaatctggcgcatgcaatcgcaaaattcagttcagctcctcctgcttttcgttcaaaatgggtaacaaaacgcaaaggtcctgtgcttgcgggatttaaggtgatcatcgcatcaccgatcgtaaaaatgccataatcagaagccacatcaatactcctttcctttaagactaaatcggtttggtaaaccggtttagttaaactttatatgaaagcacttacatatacaagagaaaaatacaataaattcaaaaaaatctgtttccagtaaaaataacccggtttttcacataaaaaacccctcacaacaaaatgtaagggggttttttgaaaattgtatgcatgtttcctcagttagcagtcttacgttcagggcttgtaccttcttcttccgcccatgtttcaatatgcttgagctccggagtattctcggctttgaatacgggatcaagaccttttttgcgctgagcggcataatccttatagatcttgtaggctacattactcagcagtaaaattgccactaagttaatgagagccaagagacccataaacaagtttgccatgtcccagacgatctggaagtcagccaaacatccgtataccaccatcactacgacgaatacgcggtaaatattaagccatgttttgcttgttttaataaattcaatattcgtttcaccatagtaatagttgccgacgactgagctgaatgcgaataaaaacatcgcaatcgcaataaatgtcggcgcccatccgccgagatggtgctgcagtgcggcttgcgtcacttggatgccgtcgcctttaggcgtaacgctgtacaataaaatgataaaagcagtcgatgtacaaacgataaacgtatcaaagaacacgccgagggtctgaattaatccctgcttagccggatgcgacacatgtgcagctgctgcggcattcggcgcgcttcccattcccgcttcgtttgaaaacaggccgcgctgcgctccgataataatgatgcttcctaagcttccgccgacgatctgctcaagaccgaacgcatttttcacaatcgtaacaagcagctcaggtaccgccgaaatatttacaatcacgacatacagcgcgatcagaatatacattcccgccataaccggaacgattaattgcgagacggaaacaacacgcttcagaccgccgaatataatgaaagccgttaatacagctaaaatgattgcgataactgttttattcacatggaatgcttcgtcaaacgccacagaaatcgtatttgactgcaccgcgttaaatataagtccgaaagaaacggtaatcaatacggcgaataaaataccgagccagcgggcgcccagtccctttgccatgtaatatgccggaccgccgcggaattcgtcaccggaacgcactttatacagctgtgccaaggtgctttccacaaagctggaagccataccgacaatcgctacgatccacatccaaaatactgcgccgggaccgcctgttgcaatcgccagcgcgacgccggtcaagtttccggttccgacacgagaagctgctgagataaagaatgcctgcattgaagacactcctttatttccttgcggcttctccccgacgattctgaacatttcaaaaaagtactggaattgaataaagcgaaaacggaacgtaaagtacaatccgatcccgactaaaatataaacaagatacttccaaataaaatcatttggaacatttatgatttcactgatgaaagcctccatgtttaacctcccttttacatatcttttactgtcatttttgctgtatatgttagatcttttaacacaacgggtattattatatcacaacaacagtggttgagaagtttttttaagaaaatgtttcggtttcttcatcacatcttttgctgtcatgccccgttttttatcttacagcctgaaaaatgttgtcacgttataaggaatgcgtgcatatcataacaaataggtctttaagaaaaaagagatgaaaagatggatggaatggtatatacttaaccaggataataattttttaaatttaataaatgtgtttactttacatttaaattagggtattataataaaaatattcagacttatgaagggaggagaacatttgaaaaaaatcttgtttttaaaagcttctattttatttttagcgattgcaagctttcatttgctctccattccccatgcgtttgataccgctcatcattttaaagcggtagccgaccagcaggaaatgcacgaaatgaaggccggccaaaatgctgatgatgagaaaaaatcgctgacgggctcatatatcttgacggcgctttttgccgcttctgtctcactgattgtgatatcagacaggagacgccccgcttcccggagaagacagcgaaagaaaagctttttaatcgctaaattttatcagtcctcgtatttcgatgagcttcatgttcaacatcgcctatctatgtaacataaaatgaggaggttgttaaacatgttgtttatcttacgaatggtgattttagggttgttttcattcactgcattgaatttatttgtatggcagggaatcgaagtcattcacgctatcactgacttattcggcagccatgaaagctaaatagtaaaacctccgctcaatgagcggaggttttttattttatttttactcttaaacatcgtatgcagggatacgccatacatctgttaccggccctgtctcatcttcatcggtaaagaaggagccgttgctgtatcggtcattcgcccgcaaggacttcacggcgatttcgattctctcgcctttttctgtttccgcagcgatcatgtcggccaaagcgcacgcaaatacgccgactgcccgatgcgggttcttttttagctcacgcagcatgatgacaccgcgtttcgccctggatgttttttcgaattcagataggttcatccgtttgattgctccccgctgtgtgacgaggacaagcgaatctgtttcatgcaggatttgccctgatacgacggtatcaccgtcttttaaatttatgccctttacgccggccgcacgggcaccgactacatttacttcatcttcaccgaaccataaaccgtacccgaggcgggtggcgataaacagctggctgccgccgtctgtgacatgaacatcaatcagctcatcatcccctttaaggttaagggcaacaagcgctttcgagtaacgctgcgctttgtaatgcgtcatttcagttctcttcaccataccgtttttcgtcatgaacagtaaatatgaagatggatcaaattcttttaccggtatagctttcacgatggtttcatcacggtcaatcgtgatgatgttcgttacgtgctgccccatgtctttccacctgatatcgggaagctggtgaaccggacaataaacatagcttcccttattggtaaagagcagaagaacatccgttgtattcatttcaaattggtgaatcagcctgtcagtatccttcataccgaaatcctggccgttagaagcggcaaatgaccgctggcttgttcgttttacatagccgtcttttgtgactgtcacatatacgtcctcagaggcaaccatgacttcaagattgattttaatttcctctatcttttcttcaatgacagaccgtctgctgtcagcataggtctttttcaattttttcaggctgcttgtaatgacttttaacagctttttatcatgacttaaaatggcttcgagctcctgaattttcttgctgagctcttccgcttcctcttttagcgccgtaatatccgtgtttgtcagacgatacagctgcaaggatacgatcgcttcggcctgcggctccgtaaatgcgaatttagaaattaagttttgtttcgcatctttcttgtcgctgcttgcccggatgaccgctatgacctcatctaacacggacagtgccttcatcagtccttcaacgatgtgatgccgctcttttgctttttgtaattcaaagacggagcggtttgtcaccacttccttctgatgggaaatatacgcatccaggatggccgtaagactcatcagcatcggccggcggttatgtatggcgaccatattaaagttatatgttgtctgcagatcagtgtttttatataagaaattcaggatgccttttgcatcggcttctttctttaactcaacgaccacccgaagccccgtgcggtcagtttcatccctgacttcagaaatgccttcgacttttttgtctatgcggtattcgtccattttcttaacgagattggctttgtttacttcaaacggaatttctgtaatgacgatctgctcccgtccgcctcttacggattccacttcagccttgccgcggataataattttgcctttaccggtttcataagccttccgaatgccgtcgactccttgaataatgcctcctgtcggaaagtcaggccctttaatcacctgcatcaagtcatcgacagtgcaatccggagattcaatccgtttaatgacggcatcaatgacctcacccagatgatgagggggaatatcagtcgcatagcccgctgaaatcccggttgatccgttaacaagcaagttagggaacatggcgggcaaaacaaccggctctttactggtgtcatcaaagttcggaacgaattcaaccgtatttttatcaatatcacgcaaaagctctgacgcgatagaagataatctcgcttccgtataacgcatggcagccggcggatcaccgtcaatgcttccgttattgccgtgcatctcaatcagcacattccgcactttccaatcctggctcatccgcaccatcgcttcataaacggagctgtcaccgtgcggatgataattaccgataacgtttccgaccgtttttgccgctttacggaaatttttatcgaatgtatttccgtctgcgtgcatggcgtataaaattctccgctgcaccggctttaaaccgtcacgagcgtcgggcagcgccctgtcttgaataatgtatttactgtagcgtccgaaacggtcgccgattacttcttctaacggtaaatcatgaaataattctggctgtgccactattaaacctcctcagcgaccgacaagttttcattttccaaaatattgctttcctcatctaatccgaaggcaacattcttttcaatccattttcttctcggttctactttgtctcccattaatgtcgttacacggcgctctacccgtgccgcatcgtcgatcttgactctgacgagcgttcgcgattcgggattcatcgtcgtttcccagagctggtctgcgttcatttctcccagacctttatagcgctggatggtatatcctttgccgactttctttaaaacgccgtccatttcttcgtcggaccaagcatattcaataatctctttcttgccgcttcctttgctcactttgtaaagaggcggaagggcgatgaaaacttttccgtgctcgattaaaggtttcatatagcggtagaaaaacgttaacagcaagacttgaatgtgcgcgccgtcggtatccgcgtccgtcatgatgatgatcttgtcatagttgatgtcctctatatcaaaatctgcgccgacaccgccgccgatcgcatgaataatcgtattgatttcttcatttttgaagatgtctgcaagctttgctttctctgtgttgatgacctttccgcgaaggggcagcacggcttggaatttccggtctcttccctgttttgcagagcctccagcagagtctccctccaccagatacaattcattcttcgccggatttctggaaccggccggtgtgagttttccgctcagcgtcgcttctgattttttgcgctttttgccgcttctcgcttcttctctcgctttacgggccgcttcacgggcctggcttgctttaatcgcttttttgacaagcagggttgccgtatcgcggttttcttccaagaaataagcaagattctcagaaatgacggcatccgcggcggatctcgcctcacttgtgccgagcttccctttcgtctggccttcaaattgcagcagttcctccgggatacggacggaaatgattgcggacaaaccttccctgatatcggcgccttcaaggttcttgtctttctcttttaaaagggcgacctttcgcgcatactcgttaaacgctcttgtcattgccgttttggctcctgattcgtgggtgccgccgtcctttgttctgacgttattaacgaatgacagcatattttctgaatacccgtcattaaactgaaacgcgaaatcgacttcaatgtcatgatgctcgccttcaaaggacaccacttcgcataaagcgtctttttcctcgtttaaataagcgacaaatgcttcaattccgttctcataataaaatacttcttttacgcctttccgttcatcaattaattctattttcaaaccttttaacaagaaagccgattcgcgcagacgttctgacagcgtgtcaaaattataaaccgttgagctgaacattgacggatcaggtttaaaatgggtaagcgttcccgtttttttggtcgttccgattttttcaagtgaagtcacgggcttgccgccgttttcaaaccgctgtttatagacatatccgtcacgctcaatagtaactgtcagccactccgataatgcgtttacgacagatgcgccgacaccatgcagaccgccgcttgttttatagccgccctgtccgaatttccccccggcatgcagcacggtgaaaataacttccggcgtcggctttccgagcttatgcatcccggtcggcattccgcgtcctctatcctgaacggagatgctgttgtccttatgtatcgttacgataatatgatctccgtagccggcaagaacttcatcgacggaattgtcgacgatctcatataccagatggtgcaggccgcgtgcgtccgtcgaaccgatgtacattcccggtcgttttctgacggcttccaggccttcaagcacctgtatggcatcttcgttgtaatcaaattgctgttttctagccaaacgtacaaacccctttcaaaaaacctgctcttaatcattctcttttttaaatgttttcatgtctttgtttttcagtatgcgcaagcttcggtccaattctcctcggactcacaattataaccaatatgcttgatttcgcaacatatttaagcgaatggctcgttttttaggccgcaagacatacattcgaacggcttttcatctttttggtgcccttttcggcagataagaacatgagttcgctttctattatatagctttatgccggccatcgcaaacagactgcaaacccctgtataaaggggtttctaaaaaagctgttcatgctttattgtatctgtttcatcatcatacgcaaagagtattctttcaataaaaaagcaaaaacccctgatttgccaaggatttttgccttttttgttcctattttataacagcgcgggcgacttttatacataaatccattacagccgtccgtcctttgtctgtaatcatgcgatacgcttcttcatttgcaaggccctgctgcgcccaaaaaacgggagcgtccgtctgtaaaaattcttcagcaacgccgggaagctgctcagagcgtctgaacacattcacgatatcaatcggtccctccacgtcttttaatgaagcaacggctttaacgccaagcgcctcatcaatcgttgggttgacgggaataatttcatacccttcatcctgcatcgctttggaaaccatgtaagaagtccggtcgggacgatctgacagcccgacgaccgcgatccgtttgctccggtccagaatttctttaatctctgattttgaaggattttgcatctttaccatctccttttgatatattgtacatgaccgcttcgccggaatcaaaaaaagcgatttgtcagcttaattctcaaaaaacttgtcatcagacggtaacaactcgtgttaaaatagagtgaagggacattgaaaaggagaaatgtagatgttgattgctttattgattattttggcctatgcaataggcagcatcccgtcaggtttagtcgtaggcaaacttgcgaaagggatcgatattagagaacacggaagcggcaatttgggcgctacaaatgcttttcgcacgcttggcgttaaagcgggatctgtcgtcgtcgcagccgatattttaaaaggcaccctggccgcggcgctcccatatttactgcacgtccccattcatcctcttctcgcaggggtggcagcagtgatcggccatgtattccccgtgttcgcaaagtttaagggaggcaaagccgtagccacatcagggggcgtcctgctgttttatgctccgctgttattcgttacgatggttgcagtatttttcgtatttttattccttacgaaatttgtttctctgtcttcaatgttaacagggatttatacgattatttactgtctgtttgtaaaagacccttatttattaatcgtagtgacgctcttgaccgcgtttgttatctacagacacagggcaaacatcaaacggattataaacaaaacagaaccgaagatcaaatggttttgatgaaacttcaattttgacatcaaaatgccatatgcgtttataatagagataatttctttatatgagaaacaaaaagggagtgttccggatgaacatgaaagtaacgaaaggcgcgctggattggtacaaagaagagctcgatctggaaacaggcgaccatgtccgtttctttgtccgttacgggggatgcagcaacgttcagaaaggcttttctctcggcattttaaaagacctgccgatgaacatcggcaccagcacggaagttgaaggcattaccttttttattgaagaaagcgacttatggtactttgataatcacgatttgtcagtcacatattcagatcaggcagaagagccggtatttgattacgtgtaaaaaaaagaacgcagcggatgcgttcttttttttacagcctgaacctttttaggtgatcagtcagacgttctttttctaatatgcttctttgcgtttctccgagcaggtcaaagtggggaaattcatttttatggtgaatccactccggcttcagcccgtactccgctccccatctgatcagtttattgagatcgcttgaaccggccttcgtcacggtcttagcctccggaaagcggtcgtccagccagtaatgcgttaaaaaagcgattttcccttccgatacatcctgcttccatctttccagttccttacgcgtaattccaaatgccataagtgcagccgctccttatttttttgccttttcgtaagcggcatgccaatcaggaaaagccttgcgaaactgaatcggtttgaagctctctttatcaacgcatatatgagaggatgtcgctttgatggcaagttcttgatccggattatagatgtggtagccgtaaacggttttaaatccgttatattcttcaatccaagtatgtacgacagccgtttcaccgtagcggagcggctttttataagaaatgctgatatccaatacaggggacagcactcctctatcttccatatccttgtaaaggaatccgagttccttaatcagcgccgttctgccgacctccatccagactaagtaattggcatgatagacgatgcccatttgatctgtttccgcataacgcacttctatttctttttttgacacatgcaacgttctctgctccctttttatcagattagccccattttatcacaacgagccggaaagagaaaaaaaccaggtttccctggtttttattatgattgatagccgttttctcttgcagccgattcatcctgaatttcactgcggaacgattcaatgctttcattgcgtctggcattcttttcttgaatgcgctgtttttcctcatctgtcgcaaattccattgattctttcgcttcttctatattttcaattgtattctgcaccatatcctgcagcttttcaacgttatcggaacggtcatccggattcggtttttgatcattgtttgtcataatgtctgctctcctttgatgatgttattcgcctttcgtctgcatgacaatcggatgtccgtttgacttgtcatgaaacttttcccctttgttgcgtttatatttaacgggttttgtccctaagtggctcggagcgtattgcggctggccgtctttcttgtttatgcccatgttcatccctccttaagagtatattttgcaaaaggaggtgcaaacatgactgcaaattaaaggttatttttgtttgaaccgctgctccagcttttcttcaagctgattcaaatattccgtattggtcatcagctcacgtttattttccataaccaattcatgaaaagaacgttttcgcatttttttcaatcttctcacctccgtgttttcattcattttttccaatttttcaaaacctaagcccttcacaataaaaaaactgaacctctatttgagatccagtttttctttcatttctttttttgtcatcgtgcctacgcgaatgtgctgaatggttcctttttcgtctaatatgtatgttgtcggataagaaagcacgttgaaatccccgttaattccgcttttgtcaatcagaataggaaaggtcagctgataatgatcagcaaatgatttcacagcctgtatatttttttcagaagacgtaaaattaacggctgctaccgcaatatcaggatattctttctgcagctcctgcatatccggcatttccattcggcacggcttgcaccacgtcgcccagaaattgaggagcactttttttcctttataatcagatagggagatactttttcctgacaatgtatcaagtgtaaagtcaggggctttcatcccttcttctgtcccttctttcggacttttttgcacggaataaatgttccagcccgcatatactaacaacccgataagtaacattccgcccagccatttcgcaagcatcttaagcctcccgcataaaaagagagaaagcagactgctttctctcttttgttcattctgctactgtttcattttatcgcgaagcaccatttgtaaaatgccgccgtggcgatagtaatcaatttccacttcactgtcaaaacggacaacgacttcaaacgtttttaccgtaccgtcttcactgattgctctgacagtcagcaagtcgcgcggacgtacagattcatcaacatccacctcgatgacttccttaccggttaagccgagtgtatccgcgttttcgccctgtttgaactggagcggcagcacacccatgaagacgaggttgcttctgtgaattctttcaaagctttcggcaatgactgttctgatgccgagcaggtttgttccttttgcagcccagtcacgtgaagagcccattccgtaatcttttccggccaggacgacaagacccgttttatcttctttataccgcatgcaggcatcataaatagatgtcacttccccggtaggccaatgtgttgtgtagccgccttctgtacccggtgcgatttggtttttaatgcggatattggcgaatgttcctctcatcatgacttcatggtttccgcggcgtgagccgtaagagttaaagtcacgaggagaaacgcctttttcctgcaggtatttgcccgccggtgtgtcttttccgatcgctccggccggagaaatatggtcagtcgtcacggaatcgccgaatttgccgacaacgcgaagtcctcttaaaggctcaacttttcccggctctacagacatttcctcaaagaatggcgggttttgaatgtaagtggaatcctggtcccacttatacagcgcttcatccgtcgtttcgatttcgttccagcgctggttgtcgtcaaataccgtttcatactctttgcggaataattccggcgtaacagtctgtttgacgagagaattgatttcatccatggacggccagatgtcatcgaaataaacattttgtccgtcatttccgacgccgatcggatccgttttcaggttgatgtttacagttcccgccaatgcgtatgcgacaacaagcggcggtgacgcaaggtagtttcctttgacaagcgggtggatccggccttcaaagtttctgttacccgacaggacagaagtgatcaggaggtcatttttagcaaccgcttcttcaatctctggagaaagcgggccggagttcccgatacatgtcgtacagccataccccacaaggttaaagccgagctccttcatgtaaggaagcagacctgagttgactaagtatccagtaacaaccttagaccccggtgcaagtgaagtcttcacataattcggcactttcaagcctaattctaccgcttttttggctaccaatccggcaccgattaatacataagggtttgatgtattcgtacagcttgtaatagcggcgattgcaatcgcccctgttttcataaccgcatcttcaccgctgttaagtttaaatgaaatttctttgttctcttcagcagcatccgctccgaatccttggttgccggccgggctgacaagatgttttttaaacgtttcctgcataacggaaagcgggattaaatcctgcggacgtttcgggcctgaaaggttcgcttcgatttttgacagatcaatttccacaacgtctgtaaaaatcggctcttccgcgtcaggcgtatagaataaaccgttgctgcggcagtatgcttccacaatatcgatctgctcttcttcacggccggtcagacgcaggtaagaaagtgcttcctcgtcaaccgggaagaatccgcaagtcgctccgtattccggcgccatattggcaatagtcgcccgatccgcaagcggaagctcagcaacaccaggaccgaagaattcaacaaatttattgactacgcctttttcacgcagcacttgagtgactttcagcgccaagtcagtcgccgtcgttccgttaggcaattttccgacaagtttcgcgccgatgacctcaggaacagggaaatatgaaggctggccgagcattcccgcttccgcttcaataccgccgacaccccagccgaggacgccgattccgttaatcattgttgtatgggaatcagttcccaccaaagtatcaggataggtcacaagttctccgtcttcctctttcgtatggacaacgcttgccaaaaactcaaggtttacctggtgaacgatacctgttgcaggcggaacggcctgataattgttaaacgctttctttgcccagcttaaaaatttataacgttctgcatttctttcgaattctaagtccatattaatggctaacgcatcttccgtaccggctttgtcaacttgtacggagtggtcaatgaccaggtcaaccggaatttcaggattgattttatcagggtctccgccgacagaggccatggcttttcttaaagatgccaggtcaactacggccggaacgccggtaaagtcctgcagaataacccgtgacggtttaaacggcacatcgatatcttttaattcagcagtaccccatcttgctaaattttcaacatgctcttttgtaatgacgcgtccgtctacctgacgcaaaacggattccaaaagaaccttaatagaataaggaagttttgaaacattgccgacccctgcgtcttccaatgcttttaatgaatagtagttgtatgttttcccatttgaagaaaatgtttttcttgcttggaaaacgtcttgtgttgcgactttttgctgatttgtcattctccaaaatcccccttcaatgatcaagatcgttctttagatgaatgttcacattccatcacaattttctcacaatttcatcttagtataaaatcatacataagtaaatatcaatgtttttattaaatacaataagatcgtcttatcagcatattttcggtaaattttgtccgattttccgcctcatacaacgggctgtaaagagccatattaatgttgaggtgatgatcatggtaaaacggaaagccaatcatgtaattaacggcatgaatgatgcgaaaagccaaggcaaaggcgcgggttatatagaaaatgaccagctcgtcctgacggaagaagaacggcagaacaataaaaaaagaaaaacaaaccaatagccggaacaccttaaaaaggaggctttaacatgacaaataaaaatacgagtaaagatatgcataaaaatgctccgaagggccataaccccggccagccggaaccgctgagcggaagcaaaaaagtgaaaaaccgcaaccatacaagacaaaaacataatacaagccacgatatgtaaaacagaccccggtgtctgtttttttgtgccattcacccatttaaagcttctgcatacgttatagcaaggctttttaatatggaggaatgcttccatgaatcactcaaaaaacgctgaagaatttgatgatacggaagaatggctgcggcagttttacgaggacccgtatgcttggtatgacgagacgctgccgatcgatctatatgaaacaagccgtcagtatatcattgaagccgacctgacggccctgaagcaggtgcaggcgatcaccgtcactctttcgggaaatgagtttatgctctctgttaaaacgcttgaacggacattaaacaaacaaatggtgcttcctttttatctgaatgacaaacatattttcactgatttcaccaaccatattctgaccgtctccatgaacaaggagcctaatgagactcctgcctcattttcctttcaatttcctctataacataaaaaagccgctttcatccctcaatggaagcggcttttttgtccggtcatatcagtcatataccctcaaagtgaatctcccatggccaaatagcagaatcactatacgatagaatatgttctagcaaccgaattgactggacatctatcattttttctattctttttttcatgtgttcttctattctgtcttcgtttacaatatggttaaagtaaggaggagatagaacaatgctagaaggctggtttatgtggtttattttattttgggtcatcgtgatgatcggattgctgtctatcggcggattttttatgttccgaaaatttttaaaacgcttaccgaaagaagacggccggtcagaactggattggcaggactattatattgaaaaaagcaggcacttatggaatgcgggtgacaaggcgtttttggatgaattggtcgctcccgtgccggagctctttcgggatgtagccaaagcgaaaatcgccggaaaaatcggtgaactttccttagcggaggaagctgaacaaataaatcgtgatttaatcatcaggggttacatactggccactcctaagcgtgatcatcaatttttaaaaaagcatctccgcgaaaaacagattgatcttactccttatcaggccctgctcaaataaaaaacctttccggcggacggaaaggttttaattcatctgaatatcagcggtcttcagttcattcgaaagtttgcggtaagacataaacatcgcgatgcgccacggaacaatcattccgaaagccagaatccaaaacattccgcttaaagctccgtaatcaatcgtcgtgctcaaaatggatttcatagcgattctgataaccagcaaaccaatcaggataaacacaaacgcttttgaccgttttaaatagatttcattatttttaatctcaaatttagatgttttaatcagaaaaatagagaagatcacgcccagcgtaatggcctccaaaaattcttcgcccgtcactctgaaaatcggaaaaaggaacataagcgctcccgtactcatgaaaatcggcgggagaattatttttttaggtgaagcgggcttgtcggaggctttaatcctgacgatcatcacggaaatggccatggccgctgcaataacggatgaaattataatcatcatctttatcattcctttgcttgcacggagtttgatactatatactatactccaaaaacataaaaaaaaccaatttgaaaagagaacacgtttacgttcccgttacccggcctacggcctccagcactttagatgcttcaaacggtttaacgataaagtctttagcgcctaattcaatcgcttccagaacgatccgctgctgccgcatggcggtgcacatgatgatccgggctttcgggtcaaaagctaaaatatcctgcagcgcctgtataccgtttttgaccggcatggtaatatccattgtcaccaggtcgggacggattttttgatatactgccagggcttcctcgccgtcagccgcttctccggccactgtgtaattcgccgtttccagaatctctctgattttcgccctcatgaacttggcgtcatctacaactaaaactcgtgtcatattcccctccacatatttaacattaactagtcttattgtaccaaaaacgaaagggtatataatagttcaaaagttattaatccgttacagacccgtaaatcctccgaaaagatttgacagaacgatcagaatgtagctcatccagttaaaaaacagcataactccgatcagaatcataagaatgccgccgattttcatgataagcagctgatgcttgcgaatccaattcattctggtaataaaaaatgaaagaacaagaaaaggaatcgcaaaaccgagaacatataaaaacatatacggcactgctgaagaaggatttgtatttgccagcgaaaacacggctcctaaaataggcccgctgcacggcgaccagccggctgcaaacgcaagaccgatcagaaccgaaccgataaacccctccggacggcgcttaaagtgaatgcgccgctctttcatcatgaatttcggctgaaacacaccggcagtaatcagcccgaaaagaatcagcatgatagcgccaaactggcggatcgcttcatgatattgggtaaaaaaactgccgataaacgaagttccatatcccaatgcgataaaaatcacggagaagccaagcaaaaaacaaagtgtatgcacgaggccacgcttttgcagcatcaccttttctgttttcacctcgtccatactgacaccagttatgtaagataaaaaggcggggtacaacggcagacagcatggagaaatgaaagacagaaatccggccccaaacgtcagaaagtaattaaaactcacgatgacacactcccttcgagttatgacaaaatcatttcatttttttaacactttcccgagaaggattactttttatagaaaaagcttatataatttaatttgacatcgagatattatactccttcttatttgaaaaacagtataaatgtggatataataatagcgactcaggtgaaagatttatgtatgaaaggatatatccctgtgattagagagcatctattaaatgaaattgaaaaaaaacgggcagagctgcttaaaatcgtcatgacaaacggaatgacatcaaacattacgatagaactcagccaggagcttgaccaccttctcatacaataccaaaaagaactgcacaccggcagttggggtgaaacatgacgcaaaaataaaaaaccctctccgggttttttatttttataaccatgtatctctatatcataatctgtacgtattatttcgcttgattattcatggctttcatcatttgattaattttcttttgagaaggtttcattcccatttgcatcatcatcatgcgtaacatttgttcattaataggcggattctttttcaaatagctcatcatatatttacgagcaataaaaaacccgagtgcaacacctatgagcaatgcgacaacgcccactaggatgccaacccataaagtcattttatttcctccttcatgttgtctagtttaaagtgtactaaaccaaaggctattatacaacatttacatctctttttcctcgtttttagacaaaatttctttccctgaccggatttaaccacccgtagcgccgtgtcttgaaatccattgcaagaaaacaggggctgattttacgcagaatctcaaagaaaatcgtttccgcctcataatctcccgaagccgcaatctcaattaaactgtctttcatcatgaaggtggcgcggcccttttctccgggcagtgtaagccggtaaatggaatccaaacggctgtaactcattcggtttaaatgcagctggagccgctgatgcatatgtatcaccggaatcggttccgttatatattgaacttgcttttctgtcatttgatattcctggggtgtcagatctgtccaatgatagtctcgaaacaactcaaacatagccgtttcccgcccgaagtagtggttcgcaaactcatcctttatcaggtgcgtatagtaatgacgttccatttcctcatccccttttacagcgcttcgttattgctttctattatacaaaaggagaaaagaaagaattgtctattactgttacgccgccccttctatttttgtcgcataaacaggaaaaagaggatgatttgactcatcctcttttgtctcgttatttgtttagaagttttttcacgcggtcaactacgttttctgcagtaaacccgtattctttcataattgtttctcccggagctgaagcaccgaaacggtcaattgcgagaacgtctccttcaagaccggtaaatttgccccatccgaagcttgaacccatttcgatcgcaagacgtttcgtcacattcggaggaagcacgctgtttttgtactcagccgattgtttttcaaagcggtcccagctcggcatgctgactacagatacgtgaatgttttcttcagccagtttcgcttgagcttcgatcgcaagtccgacttcagagcctgtcgctaaaagaagggcgtccggtgaatcggtttttgctttggaaacggtataagcccctttttccacgcccgcatacgcttcttcagcctgctgatcaatcgtcggcaggttttggcgtgtcaatacaagagctgtcggatgatcttggctttgaacggcaaccttccatgcagctgcggtttcatttccgtcagcaggtctgatcacagaaaggttaggaagtgcgcgtaaagaagcaagctgctcaatcggttcgtgagtcggcccgtcttctcctacggcaatactgtcatgcgtgaatacataagtgacagggagtcccatcaatgatgccagacgaatggcaggtcttaaataatcagagaatacaaagaatgtgccgccgaatacgcggaggccgccgtgaagcgccattccgtttaatgcagcgcccatcgcaaattcacggacaccgaaccagaagtttttcccggcgtagtctttggccgtgaagtctcctccatttttgattgtcgttttatttgaacccgcaaggtcagcagatcccccgacaaagaaaggaattttcttggcgatcccgttcagtacctcacctgaagatgcgcgggaagcaaggctgctgcctttttcataaacgggaacttcctgatcccagtctttaggaagctcgcctttcatgccgagtgacagctgttcagcaagctcaggatatttttctttataagccgcgaacagttcattccattcctgttcttttttcgagccggcttcttttacagcttgattgaaatgcccgtatacttcttccggaacataaaaatcttcttcaaacgtccaagcatacgcttcttttgtcagcttgctctcttctagtcctaacggagcgccgtgaacgccggatgtgcccgcacggtttggagaaccgaaaccgatcgtggttttcacttcaatcaaagtcggttttttatcattctggcgcgctttttcaattgcagccgtcaattcagcgatgttgtttccgtcctcaacataaagaacttcccagttcattgcttcaaaacgctgctttacattttcagagaaagatcggtctaaatcgccgtctaaggaaatgtcattagaatcgtataatacgatcaggcggcctaattcaagatggcctgcaagagaagcggcttcggaagaaatgccttccattaaatcgccgtctccgcaaatactgtatgtataatgatcaactacgttgaatgaatcacggttatatgtctcagccagatggcgttctgcaattgccattcccactgccattgcaatcccctgtccaagcggcccggtcgttgcgtctactccggctgtatgcccgaactccggatgtcccggtgttttgcttccccattgacggaactgtttcaagtcttcaatgctgaggtcatatccgcttaaatgcagcatgctgtataaaagcattgaaccgtggcctgctgataaaacaaagcggtcgcggttaaaccagcccggattctgcggatttacattcataaatttcgtccacagcgtgtatgccatcggagcggctcccatcggcatgcccggatgtccggaattcgctttttcaattgcgtctatagatagtgtacgaatggtggcaactgatttcttttcaattgtatccattataatccccttccttattgttgtaccttttcatcataaagcgatgctgactttttctcaactctttcagcttaaatttgagataaacttgttgaaaattgtcgtaaagcacatcctgatattagtatatacgaaaaaagaatacgtattgccgtattctttctgtttagtgaagattatttttctgttgttctctttttaatttttcaggggtgacatcgttgccttccggatcaatcacttttacgctctttaacgtatttttcattgaggagcggaatcctttcaaatactcctggcgaagcttttgctgttcagctttttcctcatccgttattgtgtttgatttagctttttgagccaattcgttaattcttgcgattttttctttagaaatcataataagctcctttggtgcgtgttgattatatactactaaaacgcagtcttttttacaactgatgcgcgtcagctgccttctgtgtctgcggtatattcctgaaaccgccggtgaaccgtggctttggacacgtcatagccgaatcctcttaaggtcgctgcgatttctgcaaaggtaagcttgttggctctcagcctgataatttccgaaaccggaacctcttttttttcttttccgctgttttcatgtctgtttttcagattccgttcaggcttgtagccgtttttcacggctcttttcattccccgccggattttcatattgtgaattttcctctgatattcctcaacaatactgacgatttcaagtaccatcgaatcagcttcggaaagctccagttcacctttatgagccgtcgtatatattttaacgttctccctgtaaatacaatgcaaaagcgcaatcttggcgtttcctcttcccaatctcgtttcgtcctgcaccaatatcgcgtcaatatgtgattttttaatttcatcaagcatttcaaatactccgtcgcggtccatttcgtaaccgctggctttctcagaaatgactttcacgacttccatgccgtttgcagcagcgatctcactgagctcctcttcctgtctttttaatgacgtttgctgctgttctttgtttgtgcttacgcgggcataaatgagcgccttcatttctctctttcctctctaattgacaatggccagctgatatacggccggatgcttcttcttaaccggtagaataagttcgtctccgggctttatatcagcagtctggagatgattattctccgtcacccactcaatgaaatcttctttattaatgtgtttcttttctgctacatgatctgcaagtgaccagagtgtatcgccgtcctgaacctttattttaacatattggctgagggactgatcatttcccgcacatgaaacaagtaaaatagcggcacttaaaatcgcagtaaacagcccgacaaatatgatagattctttcgccatgtaaacaacctccgataagaatgtttgttcgctttttatatctttcagtatatacgaacaaatgtttctgtcaatcgtttttttcgaacctatgtttgtactgtcaggaaaatcatgctataatctacttaaaatcgacgttttgaggtgcgaaatatgacgaagctatcaaaaaggcagcttgatatcctgcgttttattaaagaagaggtaaaaacgaaaggatatccgccttctgtaagagagataggagaagcagtaggactggcttccagttcaaccgtgcacggccatttggcgcggctggagacaaaaggcctgatcagacgggaccctacgaaaccgagggcgattgaggtattggatgaagaagaagtccatattccgaaaagccaggtcgtaaacgttccggtcatcgggaaagtgacggcgggtattccgattacggctgttgaaaatatcgacgagtattttccgcttcctgaccggatggttcctccgggcgaacatgtctttatgttagaaatcatgggagaaagtatgattgacgccggcatttttgacaaagattacgtcattgtcaaacagcagaacacggccaataacggagaaatcgtcgtagctatgaccgaagatgatgaagcgacggtcaagcgcttctataaagaagacaattatgtgcggctgcagccggaaaatccgacgatggagccgattatcctgcaaaacgtaagcattttggggaaagtgatcggcgtattcagagccgtccattaattctattaaacttcatttatcgtaaaaaacccctctgtaaggggtttttttgcataaaaaaagcagattcgccctggcttaagaaacgaacctgctaaggaggaaaaacttacattcttattatccgacatcgcacttttgaagtcaactaataatgtttccctcgagaaacttttcattcatttttcaactttttatatatttgtgcgtgatgaatttgcttttttatcttttctttgggcgggcacgtcaaaaaatttatatatgaatatttagtacatagtgcaataagttaaatataaatataaaaaaacccgctgcctttagcgagtatctattttcaatcaaaatgataatattctacaccgtagaaccctttaatatagacgggaccacagacgtttgaagaactttcaaccagaatcctgtatttgtgatacggatcaattgattttttatcttgggcactgaggtttaaccagctgccgctgtagtttttagaacttaatgtataaaaatttccgttcagcgccatccgctggagtttcatgcttaaaccgcacgaagagttgttcattatggtgaacttatagcctaaaaagtaatcgtcggcagctacagcacccggattttcaatatgaaactcttttgcgtttccctccaaagtgaagcttgtttttgatccgaattcagtggtagccgctttagctgagtgtattccgctaaaacataataaaaaaacagcaatacatatccagtattttttcatttgcatccccctttttacatattttaacttgtgaatcctgtgatgtctattcacattttactttataaccactatatacctgtttaaaaatttgcggattgcttacaatgaagactaaacgaaataacgaaggtggttcaaatgaaacacgtaattgctttcgcttctaaaacggcgctcacacttgctttactgtacattgttctggatcttatgtaccaagtaacctttttaaacgttctgtttattacagtgatcttaagtttaatcacttattttgcgggtgattgcatgattctgccgagaacaagcaatttcacagccgttgcagctgatttcggaatttcattcattatattatggatattcctgatgaacattggcgggtttaatgtctctcctgccgcggcagcggttatctctgcactttgcatttctgtttttgaggcattttttcaccggtatttgcagcaatatgtacttcccgaagattataaggacacaacagagacggatagcacgctatggagctatcaaaccgaggcgtctgaagaattagtgccggaaaaagaccctcaggaaaaaacataaaaaggaggcaatcgcctcctcctctttttacttttgcttctgatcgtcaagcggcagctgcagcagtgagtctgtgcctgtcgctttcggcgtttttccgtcccatttttcaatccatttatatttgatcatttcatcggacattgatttcttaatgatttcgttatagtcagcgatcccttccgcttcaatttttttctttttcgcttcggcttcggctattttaatttcagtttgtgtccgttcaagttcctgtgaagacttcacccttgcatcgatggcttcctgtgtggctttatccggcttcggtacgccaagcgtcagatcatcaattaaaaatccgagactcttcatatcatcagcaaatctcttttgaacatcggccgcggcttcagcagatttttgcccgtatgtgtcaataaccgagtatttgctgattgattttcgcgccgcatcccacagccttgtttttaaatatgtattttcaatcgtttcgacgtctaccgccccgaatttgttaaacagatcgactactttatcaggctgcacgacatagttgtaagcgatatccatttctatatttttaccatcagaggttgccacttttatattttcattattcactgtctgcatacgcaccggatattccgttactttattaaataatccgactaagtgccagccttggtccaatgtgtcggattttaccccgccattcggtgagtatacaaccccgacataaccgttcggtattttttcaatgaatagtgacgctgtgacgcccgcaattaaaagggctgcacctataatcacaccgccgagaattttttttgtgtttccgcgcttattttcgctcatgctgatcttcttcctcccatgacttttttaattttttggctccgcttcccacttgtttaaagattggactaagcatcagccataaaccgaatccgatgatgacaagaagaatgatagacccgatcatcactttcatttgcccacctcttttctttcatcctgtcaattatgtatacgatcttaagaacttaaagtttcataaatttcaaaagaaaaagccccgccgacaaaataagcgtgcttattaataattgtcactgataaaatcagaaatcgtttttgtaaattggtaaaaggtcccgttttgtgcggatgctctgcttttcagcgtaaaggtgtcaaatagtgattttctgaagccggtgctcatttcgatttgaatactcaatccggatgaagattgattggcaaggttgttcggactgacgcctgcgtatttatcatttgtgccaagaagaacggcaggatacccgtgccgtttcagcacatcggtcaagagttcggcccgttctctgtctgtaccgccgatttttatctttttatcatcactgccgtaaccgtgcaatgaaatgacattagagtgccctttcaccatttgcacggccttggtttcatcgaaatgcgaacttgtcaaatgcagagctgcattaccggctgattttaacccttcaaataaatataaactccggttttcggcaatttctctggctaactcactggtccccggctctatgcctccgccgtgtatagctaatatgaggacagaagggtcatgctcccgcgttgaaatggaaaaatcggaaggatcttcattcagctttaattcctcgaaactgccgtaaagatctgaagcggcatcagcccgaaagaacggcagaagcaaaaacggtaaaattaaaattgaaattccttttttggttattgatggcatttgtatgtttatgttacaatacaaatgcttcagcctttgaagcgaacggcagaacagggtgactttggacggtttcttctgctctgcctctttgccggctgctttacggtctactcttctaaccctttttgccataacatcatcctttcttttgtttacacttttgtcacaatattatatacgttggacaaaacctccgttcatcttgaagaataaaaacatcaaaacaacctctatcctttagcctaaaaaagtctttctgttcaaagagacggaaagcttaaatgataaaaatgaaacccgtctccttagttttgtttgatttcccaattcaagaatccccgaaaaaatttgaatgtaactgctgtctccataaaaaaaagactgctgttaagcagtctttttttcgttttatttcgtgcctgttgatcccagtccgccgcggtcattgttcccgagcttgtctacttcgatcagctccacttcaggcattttcttcatgattctgaattggcatatccgctcccccttggaaatgtcggtatcccgaagcgcgaatgcaggaaaaaaccagaagtcattgtcgcctttataagattcatcaatgactcccattgaatttgtctgaatgatcccgaaatgcttatatgtacttgaacgcggaacgacatgggcctcgtatccttccggcagttccatcgcaactccaagcgggataagtttgaattcgccttttttgattgttatatgttcagctgcccgcagatcaatccaatcgccctgttcaattttactgattctcgtttgcgtatcatctgaatatttaattttgatttgtaaagtcatgttcgctgctccttttgcttccctatttcagtcgtattgatgaccaatccgtgccccattataccatttaactgataagaatgctgattttggtgtatatgcagccgaagaggaagcacggcgaagacaatgagaataaacctaaaatgaggacccctcctatcagtttttccctccattttcacatgacagcttcaattacaataatgcaaagctatatgtccgttcctttcaacagagcttttttaaaatttcgcctcggtttcaaaaggaatttcgttctgaataaagaatttgaagaataagcgcttaaagggcgcgcgattcttttctgtcccctgcctcaggcgcttatatcaaaagaaagaggtgtctttagaatggttcaatttaaaaactttcctgatccgtctttaaacgccccattgcagtctcgccctgcacagccctctgaattggagcatctcaaagcaaggatgcagaattttattaagcattccgcaacggatgataatcttgagatcgcagatgcccgggtgacggcggaaggaatggtcacctcacttttaaaagaacggcttgatacagaatacgaaatgcttatgaataaaatcacccgggaagtgaatgtggaggattacggagcggtccctgacggccgggacaatacagaagcctttcggaatgcgatcgggaacggccgggtcaaagtaaatgttcccgcaggagaatttttggttcaagggataaaactcccctcatggactactatttccggtgagggacaagggattaccgtgcttaagcttcatgaggacactcccgcatacgaatgggtcattactaacgatgattacgaaaatggaaaccgtaatatttttgtccagaacatgactttagactggaatcctgaccgtcaatgcggagtcaggaaccccggaggacagtgttccagctgtttaacgtttgctaatgtgcaatacggctggattaagaatgttgaaacggttaacgcgggtctgcatggtatagatattacatctccgacttacgatcatttgcctgaaacagaatggacgaaagacggctgccgttatatatggattgataactgtgtggcatacggcgccggagacgacggcattaccacccattacagcgaatatattttcatttccaactgccattccggaaacccccgcggcacagagcatgctgagggcagcgcaaactcgaacggcattgaaattgacgacggctctaaacatgtgtggcttttaaataactatacgagcggaaatatccgcgggattgaggtaaaggcgcacagcctgtggccggcttctcaaaatgttcatattatcggtcatgtttcgtatcgtgatgtacgttcatttgatattcgtcatatcggccatcatcaggcctcagaccccgaaagcacgacggcttatgatgttactttaaccgattgcaccgcgattgaaccggtattcaatgccctctatgacggtgtaaccccgagggcgctggtcatctctgcctataaaaacgttaatgtaaacggattcacagctattggtgatccctcatacgactatggcgggaatccagtcgtggctcttcaataccgcagtcaaaatattacgatcaacggcattaaaatacgcggctttacacaagccggggttgacatcaatatatccggcggatctaataaaaccgattatgttaaaattttaaattttgatatatacaagtcttctcctaaaggcatcacaatcggcggaggccaatataacgtaaatattatgaacggtacgatgatcggagacggcggttccgtcggaattacgtcccctaacagtcaggctgtcattctcggggtgcaagcggaaggttacagcgctgccgcatctataaaaggacagacttatgagcagatccccgtcaatttaaagggaggcgcacagctcgcgaccagctccggttttgcattcaacccgacaagcgccgttattgcgggaacaggcgatattacggccagaggtgacagaaatgcgatcatcagctcttccggaggttcaagttccgaaggttcaagggcatttatcgccgcttcaaacaatgtccatattacgggcggcaaagtctccagaacgattctgtcatcagaaagcattacattggaagaaccatacacggttgccggagggcatcagtccatcaaatggaaactggattcagcgggcggccacggtacgttcgccggagctgtcacctcttccctgtcagggtacggagaatattttgaaagtgtaaccggccagaagattcccgccgggacgatcgtcacagtgaaaggcgaaaaaattgaaccggctcacgtcggtgattatatgctcggcgtcatttcagaaacagccgcttttatctcaggagccgcaagcttcggatggcaaagccgctttttgacaaatgagttcggcggtttcatatacgaaaatgtgactgacgaagaaacaggagaaacagtacgcgtaccgaaacaaaacccggactgcagtccggctcttgaagctgactatgaagcacgcgcggccagagacgaatggcatattgtcggactcaacggccggcattacgtacgagtcgacagtacggtcagcccgggagattatatcacggctcataacggaatcgggactaaagccgcggaaggctggaaggtattgaaactgacggccttatacagcgctgaaaaagggtacggcattgcaattgcggttatcaaataggatctcaatatcaggatcatcttctctcttttctatcgggcgggtataatcctgttttttataccgaatgagatgcctctttttcagcataccgtttcatttgtccaagccatccatgctttctgtcatagaatactaccgtcagatgaaaaaaggaggaatatgagtatgagtatggacatgggtatggacatgggtatggatatgaacggacattatgatcaccagccaaagcagcctaaacaaaagaagaaaaagaagaaacaagataaaaagcatcttgattatgattacatcgttgtttataaaagaaaatgcaaaaaatgctgctgacttgacatatcaatactttttacacccggtaaatcccgggtgtttttcttattatgacgtttctccgggctattttcacccaaaatccggtcatcctatcacaatacataaaaagactctattattttcttcccttttcgcctgattaaaagtatttcatttacagaaaacaacataaatagaatgacatgacttttgagaaaatctgctctttgcttggtcaatttttctgcgataccatgaatttgcaacaattttaaaaaatttcctcaggaggtcatagacatgaaaatcgccagaacaatagtcggatcatgcttagctttatctctaacaattcctttcacagccagtgcctcagcagccagtcagtctgaacacccgaatgcgcctcacgtttcacccgttgcaaatccgttagaaagtaaattatcccaaacagcaggccaaaacgtaaaagcagcaggtgttgatgccgggctgaacgtaaacgtagatgttctcggaatcgcagatcgcatagctgaagcagttaagtcagatcaaaaccgaaccggctgggtaaaaaatgtcatggaaacaacattttacgcatcaggacagaagtacaacgtcatggtgttcaatttaaatcaagaatatgaagaccgctttaacggcgttcaattttacggatcagccgtttatgacggcattacttacggaatctgggtcttcgaagacggttcctttaataacaaaggagacgggggctggatcaattgggcattcagaggatggttcgatcgtgataatcagcatattgaattccacagaccttaattcagagaaaacttgcggcagcgcccgcaagtttttattttgataacgggatactgtacatttttcaccgttataacgactatacttgaagtgcgggctccgatcgcagccccggtaaagtctttcaaagtgagggtatgccatgtcaaagtctttaaaaatagtgttgtggagcatattggttttcattatcttgttagtgatgatcggaatcgtttcttacaatcaaactccgtctgcagaaagcgcagcaaaaagaatgctttacagcgtctaatcaattttaagccttcatcggctttttttatttaccgcagaacacttgaagttcttctgttagatcgttacgttcccattcggaatggagtatacgcgtatatcaccaggcagtccgttttgatacatggttccgattatgcctttcgcatcttttttctctattcctcatcacatccacttttttcatgctgctgctcttgaaaccaaccaatcatttcttcagcctgttccgttgaatcaaaaggttccaatcctaatagcgtgttacattttcatttttaaaaaaacaagccaactgcgcaccctcttcgcaacttctcaatgtatgagcctatccgtttctattacaggaagcagtacgattcctccttttactcattttaacggatggccatgtaaaggaaatatagactaagaaaccttttttcaaaaagtaaactagcatccctatcaaacttttcatttcggcatagtatgtattaatcctctttaggaggtgagattatatgggattctcaggtggttatggtagctcctttgcgttaatcgtggtgctattcattttattaatcatcgttggggcttctttcctcggcggttattaagaatcctcttacctccgcatccatgtcagcagcacctccatgatcgtacggcgccataaatgaaatgtttatggcgctctgctgtttttacccttttcattcacacattaaaactaaaaagatcggccgatgaacatgcagccgatcagtaattcatagattattgtgtaaggtttacatcgatgacgttatagaaggcattggaagtatccgcaacgtcccatacccccaaaatgacatgatacccgcttcgatcagtcggcacaaaaatcttatgagtcagattcgtatctgccttggaaccgtcgtggtttaccgttccgattaattcaaattcatctcttgacaaaggtttattcggattccagtttttcttggtgatataatagtgccactttgatgtcgcatgaggagctgtgtagtaccaagtaaaggtgttaaaaccgccgcggatgttttgttttacccaataatctgcagtctgcttgtctaaaccgaagtcaatttgtcccgatcccccatttgcagacgcaattcttccatccggcggacctgcagccggaaatcctttcggcccttctacagactgaggattatcaatgacggagccatatttctgcgcagcggccgtccagcccaatgtttgtttctctaaagctcccatgtacgctctgctgacgggctcttttatatacccgtgcgcagatgcatcacttgaatagaaagcgcctccaatcccaagagtaacagttaaaactgcagctttgaccaaacccttcattactgcatcatcctcccttttttgttaataaaatccctttcggtatatacacttcacgatagaggatgaaatgaccttccttttcttgataggaaaaagcaatgaggttcgcgctttcccctttgttttttataatcataaagaaaaagccgggccgattctgttgtcgaatccgcgattgccaaaaaccggcccgccccttatgctcagaacttcattcgctggatttgcgggtttcttttcggataaccggtgctacttccgctgctaatcgttcgatgttttccgcggcttttttaaacggcatacctcctatatcgatttgcgcgagaaatcgctgatgcccgaacaactcatattgatgcatgattttttcaatgatctgctgtgaacttcccacaaataaagctgtttcttttccggacgcccgctcaaaatctttcttcgttaaaggctcatcgatcccgtgatatgaatgaacgtgagaccagtaatttgaatgatacgggtaaaattcttgtattgcctgttcattcgtttttgaaatgaacatatgtccggtcacggcaaccttcacattttccggaggatgaccggctttagaagccgcttcccggtatttgtcaacaagcggcttagatgacatcggatcaccgctcagtacagccaatgccaaacccgcacctgcacgcccggctcgttctgcgctttccggagtccccgaaacacctaaccatagcggaatgcttccgcaaaaaggccgaggagaaatttctgcctcgcgcagcggcggccggtaacgtcctttccaggtaaccgattcttccccggaatttaattttaaaaaaaggtcaatgtgttcttcaaacagttctttataatggcctacgtcataaccgaaaagaggaaacgagtctaaaaatgcgccccgtcccgcaatgatttccgcccggccgtctgaaatcagatcaagcgttgcaaaatcctcaaataaacggacgggatctgcggtggataatacagtcgtggcactggtcagcttaatattttcagtaatctgtgaaatcgctgataagatggccggcggcgaagataccgcataatcaagacgatgatgctcgcctaccccgaatacatcaagccctgcgtcgtcagccagtttcgccagcttcatcaattcatctatccgctgctttgcgctgactgttttccctgtcagaggatcgggatataattctgcaaatgaataaattccaatttccatacaatcacggtgttcagccctcacatttctctcctcctgcactgtgtaaaaaagcttttatgttattctattcagccgttttataaataggaatttattcaaaataaatacagaagcttaacatgcagaaggccggtatgagaggaaaaaaagtttccggcgcccttcaattctgcccattatactcatgcagccggactaggcaagaacaaagccggcacaagcggattcgaattcatgtgttcgttttcagtccaattcaatccaatcgtgatattgatcataaagctttcctattcttccggcatcaagagcgatgacttcacaccctctgtcatcatatagaaagaaaataatatcttttgtcatattcacaaagaaaacatcgggatacccaacggaacagccccgaaccttggcttcagcggaaaatcttcgtggacggctgccttaagtaattggggaatacgcagatctttccgtttacataataaagaaaactgctgcatttcatattcttctgcatcatcttcttcaaacggacaggggcaggtcttcacctggatccgatataaatcatccttacacttcagaaacggctgataaacctttaattttctcggatgattaccttgagttttgtgcttatatacgttggcaacaaggaacatgtcatcgctatgttcaaacagttcattgaaaagtgcggcggtttgatgatgaacaagctgaaaatactcaagattcaaagcaccgctttcattaaattgatacatattgccgccgagagaaaaatgaagtcccacgtcccattgatgataaatgccgggcactaattttaaagtcggaaacctttccttcagataatcatttattttcattcaaacatctcactttccgtttcccgctccagagacagaagaagccgaaaacattccgcttatttctttttcacccttgtaatattattccgattggaatacaatgaaatagaacactgtgaaccccattgatcagggtggatgctggtcacattcatcctggtcctttcttttacacaagatcgcaccaactttgatcccctccgtttccaaccttatacatatatttcaatggtattattttcttatacataagcatcaagaggtgtcagctttgaacaacatcagaagatgaagagcatatttccggtctcaccgcaaaatgggtcttgactctgaactgcttttcacattttgattatcaagcgcttctttaaattcatcaaaatgaattgaacattgctgattcaaattacttcctgcaccttctgtcgctaaactgcaaaatgtccgtcacaatcatcctctctctaattttacaacattgctataatgattttcatgtttttcccaaccttcaagctgaatctttttgatcgttactaggtaacctaaatacaaaaaaacctgctttcagcagggttttttcggtaaaggggagattatttccccacaaattctattacctatgtttttgttttaaccattctttctttagcaatgcgtattggtaagtgttttcatatttaggtgttccatcctcgtgggcagtaaatgaaataaattcaagaaaataaccttctttacgcattcctaatctctcacatagtttttgtgacctgcagttatcatcttcaacatatgcataaagccttcttgcttctttttgcataaagagatactcaaagaaagccttcgcactttcacttgcgtatcccgccccttcaaaacgggcattgaaattccaacaaacggaataggtatctggctcttcttttaaataaaatagttctccgactagatcattactgtcttttaaacaaactgcaatataagagtcatctcggcttcttttttgaacatttacggcagcttcttctaacgtagatattctgtcatcaagaaaacaattcactctcggatgtgccgaatattccaacagaccttgtgcatctctctcggtaaaatttcttaaaattaagcgatgggtttcaattttttgcatttgcagtctcctgtttcattgttatcgacctttgaaaagaacttcttcgtttgttgaagaacttatcacaatctatttttactataatgatgggtgttatcatctttgtcaaaaacaataatcattcatttgccgcccgcaatgtaaagtactgaacaattttcgtgaaaaaccctcagtatcgaatataaaaacgagcaatagtaataaaacaaagttaagccattaaaagcttattgagtattttttcaaacttatttacgctcatcatctcatgagtgagaaatgtccccttataaaacatgctgaaagtcgtccaaactgccggggatttttgcgccatatcttttgacgttattctcagggcctgaaaatgaagtcctttcttttcagtcagttcctttaaatgctttaacactccgactgcaaatgggcattgagctgtataaaatattgtgattccctcatcattaacggaattacttttcacctgttttttaaatacaggaggatgtgcatgttcattccacgtcagtgacatcaactgaaaatagggttctgcttcatcttgcacagcaaatcccatatgctcgaagaaatgcttatcacttaaataagggagttttttcttccccactatatgaactatcccatccataccgcgggattttgcatctgacacacatttttctaacaagtgttttgcatgtccgttattcttatatttacctgagacccaaaggcaattaataaacataaaattaggtgcgcttaccgggacccacgcttcttctgcaggtaaatattcaataaaaactttggcccgttcgtttaggcggtagaacaccaagccatcactcatccgatctttgagccagctcttcttttcatttaccgcatcctcatattgtttcgtacctaacgcacagcaaatatgattgtcatcaatattgtccctggtcaactcaatgtattccatttttcctcacccgctttcttttggaaacatcagctttacttccgatgaacattgtaatttctcagaaatatagagtcccagtaccaatatatgaacgcagcagcaatgctcattatgtaataaatgaaacttctgaaaaccgtgaaatcaattgacggattacctatgtgccagaacaagaacacagctaaaaaagcgactgcggtataaatgaaaagatgaaccaaactaaactttttaggcttctttcttagccatagttgcacaggaacagcaaacaaaaagtaagtaatgaatgcgtaaaaagcaatgataactacagtaaccaatgcaattggcacaaaacccgagtatacaaacatatatagcccgaaaatcaaaccatacgacaaacttgaaaaagccaatgtgtaggtatagctctttaatcttgttgaattcagcttcaagtcaccgccccgttcatttacttcgcacttacaatatcgtagttttattgtctatttgtctgttttaatcactatttgacattcaattttataatctgtttctcctgtttcaatctttgtatcatcgcggttaactttatatttccctccatacaaacttgctgatatcgggtgccttataccactctttaactgatcgtaaatgtatttcttgccttcttgaaaattctttcgaggaacatgtcctactttgcaatcatttacatagacagctatagcttccggatcgtacttgttgttctcttctaaccgcaattcacaatttgagaaaaggaaattatgataaataaatatcggctcatcaaaagttgattctagaatctctttatttgtcataccatcatatttttcatcgaagaaaaagctgtcttcatcctcagtcttgatggctttcttaatatctttttgatagtgtgatgttcctgcaaccttaaagtctatatactcgaaaaatgcagacttttcttcatatttccttgagaagcctgtctcttgaatcaagattgggaaattttcttttttcgataccatctctgtttcgttattaacgccaacagtgttcatattattatttttattctcattttgttcatttttaactttgttcttgaaaaagttgagtatacccaaatgtacccctccatttgaaataaaagattggtttaatcaaaaaactcatcatcaataaaatcattttctcttgcaagtttattcgaatcctttttaaaaaacctttgcttcaatttttctttaactgttaatttttgtttttgtcctggcatatatgacatatataatctccgttgtttgataaatgaataagtaatttatcgacacctgaccttttgcagatacacatcctgtgctgaccatcactaaacgaaatatgaccgcaagcatttacgcttgcatatattcctgaatgttttttatgcatgtccggttttatgtagtgcgcagccaatcttctgcattttaatgcatattcatgctcttcgccttctaaagcattaaattccttatcagttaaatctaaggagcactttcctgttctaactttataacagtcatgtttacttagcctaaaataaaaagaatgtttcgtaggatttattaactgatccaacctgatccccttctctttaaaagaatgattttatgcaactccttaaaatttgtatttcgttacttttattgtaactttagtatactatgattacttttaattatcagtatacccataaaaaaggtcaaggaaataccttgactgtgtatcgctcaccaatctgcatccggctcatcgtgttcaaatccgtgaaatccacacatctccgcagccggctccttttgtgaccaataagtaatgatttctgtttgcatcaccattcaccttatcagccgcgctcaagttcaaatgatcacccgtgaaattcttttcactaagggtaaaatcatatcctgacggcgtaattctctgcagtgcaagtcaaatatctatagaaagattatgaccgcaaattcaaagcattctgtgcatttggagatgacaaacccccatttaaacacccttcggatgacaaatcatccgtagaatcctccctgcatagctccctcaatttttgtagagacacttgtccgcaaaaatgtaagggttttcaaaagaagagtcgtgtgctaaattgtaagataagtaaaaattttctgcgaatatttgaaaggggtgtatgatttgaaagcagtagtagcaacaaaagacaaaagtatagcgatcgtacaaaaagaattacgtcctttgcggcatggtgaagccaaagttaagatggaatactgcggtgtatgtcatactgacttgcatgttaaaaatgctgatttcggggatgttaccggcgtcactttaggtcatgagggaataggcattgtgactgagattggtgaaggcgtaacaagcctgaaaaagggcgaccgcgtctctattgcctggatgtttgaaagctgcggccgctgcgaatattgcttaacaggccgtgaaaccttgtgccgtgatgtaaaaaatgccggctatacagttgacggcgcaatggctgaagaagcaatcgtagcggtcgattacgcaataaaggtgccggaaaatttggatcctgcagcagcaagcagcattacttgtgcaggtgtaacaacttataaagcggttaaagtcagtgaaattaaaccaggtcaatggatcggtgtatttggagtcggcggtttaggcaacttggctgttcaatatgcaaaaaacgtctttaacgctaaagtgattgctttcgacattagcgatgaaaaattgaattttgctaagagcttaggcgctgatgcggttgtaaacagtttaaacgaagaccccgtcgctaaggcaaaagaagtgactaacgatttagggcttgatgctgtggtcatcacggctgtctctaaaacccctttcaatcaagcgattgatgttgtaaaagcaggagcccgtgtagtcgcagtcggtttaccggtggacaaaatggatttagatattccacgtcttgtgttagatggaattcaggtagtaggttcattagtaggtaccagagaagacctgaaggaagcttttcaatttgctgcggacggtaaagttgtacctaaagtgacaaaacgcccgatcgaagatgtgaatgatatttttgaagaaatggagcaaggtaaagtgaccggccgcatggttatcgattttacttcctaatcattaaggctgccgggaatgatacggcagcctttaatctctattcttgctcagcgccccacccagactgaataagactttgtcatttagttcagaaaagaaactttacagaccattcggcggacatacattttgcaagtactgcctggactaaccctgataccaatataattccaggtcattcattgccgaagcgtagctgttatgaggaaacccaccagaggttcctcataacactaaaaacctactcactgcactttttacagcagaccttatcagagtgtttgcttaacactttgtccattctacccacaggcatcttcttctcactcggaagtgtaagataagctgttatctcatcccctgattttaatgtttttccgcagatagagcattttaactcagtattaaagaaattttttaatcccattcagaagcctccttatttacctttataaagtaatacgttaatgctttataaaagtttcaggttaaagaaatactccttgtccgggaatttactttctttcagttgttacgtacccgcacagggttaacaatcgtcttgttctttaactcacagtgagaagatcgccttgtaaaacattagcgtaaaatcatcttcatgctttgaccagtttactgcagtgcatggattgttaatttgtgacacttatttgtcctctttaaatttttcttcttctctcaacttgaaaaagaaggaattattttataaatattgtaaatttatagctgtatcacattcactattaagaggaggaatacgaatgaaaaagaaaattattgccggcgctcttgcttttgggttaattccgctaatgggggctgcagatgtttctgcaaaatctttgccaaatcaagataaagtcatgaaacctgccggttggtcatgtgacgctccgtatattgcgtgtcagcctttttctggcggtaccggtaagatttcattcaactatcaaggcagctctccaggaaaaatcagagtttttgtagcgaatgacggcagcaaatctttcaaattcaccattaattatcctaatgggaatacactcttatcctctacgacactaaatgcggggaaaacgttcattcaagaattcagcgttaaccaaaaaggagaatacatcctgaaatatgatagcggcaccggtgatagtgtcgatggtttctttagatctgttgagatctaaattccgttaggaaagtcggcagttttgccgactttcttttccaagcattctgcaggaataaacgtaaagtgtcgaataaacatatgacctttttgaaacggaaactttatctgcaccacaaacccgcaagcagcctccttgtatcgtaccttccgtccctttgtgatttgttttgatttgtcgtatactgcgcttgcccgggaaatgatgaatattttcgttaactataatttccctgtacctcttcgtatgtggctctgcatgatgaagtaacgtcatggctcaccactttcatccacagttttattgcatgttgagccatatccctcctctttaaacagcaaaccgtcccatccatttctctctttccattatttcatattcttagaagctcttcattttagacttaatatccattttttcttatttagacttaaatctatgtcgaaatttatcgtccggcatattatgtactatcctaacaacaggaggtggcaataatatggggaactacggtggaaattacggtggaagttctttcgtattgatcgttgtgctgttcattttgttaatcattgtaggtgctgcattccttttctagcacattgacgatttatattcgtctcccaaacattgcatcccttagttcggacagacgccataagaagttttatggcgtttttactttttaaaaaaatctatctaagataaacattttttattttcactctggtaagcgggagagttttctcccctgcctgcgccaatattgccgctatgaagaataaggtgaacaattcaattcggaataaagacttgttcatgaacaaaacccctaaatagttgttaaaaaactaaggcgtttttaattcatcaggattacagaggttgtgaacttaaaaaggatattactcacctttataaaattgtcatcgttagatttagtcactgaatcttttttgtaagggtccgcccacaaaatgcggtgttcacacattaaatcattttcacataaaaaaaccggattcctcttctaaaaggttccggcttttctttttgttcggtatttgtcagttaatatgcaggaaatatctggtgacgtgcacacacccgctattataatatttcaatagagccttctgttccatgaacgcggattcgctgcccatcttttatcaattgggttgcattttcaactccaacaactgcaggtaagccgtattcacgcgcgataaccgctccatgggtcatcagtccgccaacttcagtgaccaggccttttatggacacaaacaatggtgtccagctgggatcagtataggggtaactaatatatccccatcttccaaatcggcatcttccatgtttaaaataacccgtgccctgccctctatgactcccgaggaaacgggcagcccggcaatcgctccggccgggagattttctcgtttgtactcgcctgtaacgatttcaccgtcagacgtgataacacgcggcggagatagtttttcatatactttgtactcgccttttcgtgtgctgatgatttggtaatccaatttatttgtgcgtacgacttcctgaagttcttcaaaagtgagatagtatatgtcttctttttcatgaataacccccgcttttgcgagttgttcggcttctttcagtaaagcctgcttataaacgaagtagcggctgatcatgccgtattttggatattctctgaatccgctgaagttccggatgatttggatcattcgtttagtttctctggctttttgttcaccgtccggtaattgcttcaatcggtctaataactcttgttctttcttcaacgcctcctgccgcccttgctcaaatttccgctggctggcatttggctcaaagtttttgagattattaagaatcatagggacaagtgcaattggtttttcgctccatcgagttcttgtgatatcaatttctccggcacatcgcattccgtacttgttgagataagcatagatagcgtcatgggtttcccgcccgccttcaaacttcaccagcccatccaaaaagtgatcatcttttacattctctaaataggcaattacttctggataaggacggatcacatcggcgacgtccaatagcgcaagccccatttctgaagtaatattatgaggtacagattgagaaagcgtatctgctgcgtttttttcacctaaccactcgttcattttttcgttaatccatgatgaagcatccattgcagttcgaatcagcaccgaactttttggattaaataaaatattctttaattcctggatatcttccaaaataaaacgaaataaatcagatcctgatttcgtctggatgttttgttttaactcttctatcgatgcctgactgctcttaatcaaatcagaaacaattgcaggatcgttttcagcttgatccggcatatctgcattgcctttgccgggaatcggcgccgttttatcatgtatcggtttaatgaaatcatctcgctctattatggtcataagtgcgtcttttaagagcggatcgtgctgccccataccttttaagaaaacttctctgacattaggggatgccagttgatgtgtgacatcgacaaatagccttccgccggctttacgcatgggtgcagcagtcgtcaacagaaaaaaagacaatccaaggggttttatgggatccgtcatcatttgctgatgaccgacagagatatagacgtgattttcttgatcgttcgcttcaggaacggggtataacgttgtgatcggacgactttggacaatataaaaagtatcgcggtccaaacaccattcgatatcttgcggctggccgaaatgagcttcgatctgtctcccgatacgtgccagctgtaaaatttgttcatcagtcagtgtttgaatcttttgctgatcaagatcgatctcccgtgtttccgttccgccttctcttcgttcatagacagccttttttttggtttctattctcttatcgacgatttgcccgtcctgtactttataacaatcggcagatactaagccggagaccagtgcttcaccaagtccaaaaccggcatcgatggacagcagctttcggtttccggtcatcggatcagcggtaaataaaatccccgaagcctgggggaacaccatcctttggatgataacagataaataaacttggctgtgatcaaacccattttgcatacggtaaatgaccgcgcgatccgtaaatagggacgcccaacatttactgatatgctgcaagatcgcatcgacgccggtaatatttaaataggtgtcttgttgaccggcaaaagaggcatgcggtaaatcctcagctgtcgcactagaacgtacggcataggcatgttcttcgccgaaccgggagagatggcaagcgactgctttgactacatctgaaggaatttctgcttccataatggtttgccggatttttttgctgacttcaccaatttgatcccgattctccgctttcagcatggtcagttgacccaacagcgcttgtaacgtttcgttttgttcaatggcttttcgatatccggcggttgtgacacaaaatccttccggtacttgtattccttgaatttttgataattcccctaaatgtaacccttttcctccaacgagcaaaggctgtgttttttcaatttcgtgaatgccgagaaccaaagaactcattctatatctccccttcaaaaaaatttgacaagagcttttcagcatgatataatcataatataagatggataactatgacttttaacacagaaagcgcgcgtgttctgattatatcaccgtgtctgtttttgtgcaatataaaaagaacctggccaatttggcgaggttctttcttcattttctaaggaaatcctgaagttgagtgatacctgtgaatccattgcagaaaggctatccccacggattcaagaaacaggaaaatctcaataataaaaaacatcccccacgcaatgtgaggggatgttttgtgtgtatacttctcatttcatcgtcatatgagtttagactgatgcagtcacaacttacaagaatgcttatctgtttccttcaatagtgttaacacatttgaagttatattagcgctgccgctgctttgatatccctaaactgtaatcgcttagtgtattgcgcgggagaaagaattgcattccatggtttattaatgccggctttctcatttgttaacagatttataaaaccaaggccattgataatgagtggccgtttattgttcttcctttgacctcctgaaaattaggtttgtctaaagctctttaaagctgtattgatatcttttgtgtgaacgtaaatgttcttatacaactcgaatagtgttttatatttttgaacattttgttcttttggataaaatgcagctgcttcatgaatgaactgctctgcacattcttcaagagagtcaaaccacccgcttccgaaggcagctaacatcgcagcccccatggccggaccttgttcattttctaacttaaccaccctcgtattgaaaatatcagcctgcatttgaagccacgtttcatttttagctcccccgccaatagagacaaccgtatcaactgattttcccgcttcgcggaatagctcaattgattcatataaagagaatgtgatgccttccattatcgccctcaaaaagtgctctcttttatgggctccgtccattccgatcaagcttccccgaatagatgaatcagcatgcggcgttctttcaccgactaagtaaggagtgtacagcagtccatttgctcctatcggaacagattccaccccccgcaataattgttcaaacgattcgttcggcgcaaacgttcttttaaaccagtccaagctgtaccctgcagcgagcgtgacccccatcgtataaaaagaatccttttttccatgattaaaaaagtgcactttccctttaaaatccctttctttgtcttcttcacaggaaagtatgactcctgacgtcccaatgctgcataacgtttttccggaagaaagaataccggctccgacagcaccgcaagcattatctgctcccccagcgtacacttttgttttttcgagcagccctgtcttcgccgcaacgctcggaagcagcgatcctacacagtcatgggattccacaagcggaggacaaatttctgctgaaataccaaattgattgcaaatctcatcgctccactctttgcgggtcatatgtaaaagtaacgttcccgccgcatcggagtattcggtgtgaatggcgccagtcatgcggaatctcacatagtctttcggaagcagaaaaacagcggttttgttaaaaagttcaggctcatgttccttcacccataacattttaggtaatgtaaacccttcaaggacacgatttttgtgatatcaagcagatgattgccaaatgtctcggttatcctgctgcattgaggcgtcgttctggtatcattccaaagaatcgcatgacgcagcacccgccgatcttggtcaagcagtactaatccatgcatttgtcctgaatagctaatcccgtcaatatccccggcttgaacgttggatatcgaaatcaattcagccaacgcttcaattgtttgctgcacccagtcttcaggattttgctcactatatcccgccttctcttggatgagcgggtaacttttggacgtttctgcacaaaccttgccgttttgattgactaaaatggttttaacagcactcgttccaaggtctattccaatgacatacttcattttttcactccttcctctctaaatagatttccgttgaaatgacccgccataacagtaacttcatgacgggcaattccgggaacttggctgcctgcatcttttatgcgggatctggagcttcttttttcatttggttatacctgtaaaatgtattggtttaatatcgcttttagccgttcctgtctccctgattcgtttttaattggctgattgttcagcgcatattgctcaagtgtcttaaaatcagctcttccttctgcaatttcaagaccaatcccttcagtaaagctgcggtaacggtgttgaatcacatcttcaaacacacgatcttcgattaatttgtgggcggctttcaaccctcttgcaaatgtatccatccctgcaacatgggcatatagtaaatcatcaggctcaaaagaagatctcctgacctttgcgtcaaagtttaatcccccgcttccaagaccgccattttgcaggatttcgtacattgctaatgtcgcagaatataaatctgtcggaaattcatctgtgtcccatcctaaaagcggatcaccctgattcgcgtcaacagagccgagaaggccatgcactctcgccatgcgtaattcatgttcgaatgtatgcccggctaatgtggcatgattggcttcgagatttaatttaaaatgattgtctaagccgtattgctttaaaaaggcaatggttgttgctgcgtccgtatcatattgatgggtggtcggctcttttggttttggttcaatcaaaaactgccctgtatacccgatttccttcgcataatccactgccatatgcataaatctggccatattatcaagctcaaattttaaatcggtatttaacaaagtttcgtacccttcacgtccgccccaaaatacatagttctcggcgccaagctcttttgctgtttctaatcctttttttacttgggctgcggcatacgcaaatacatctgcattacaagaagtcgccgcaccatggacgaaacggggattcgtaaacatgtttgcagtattccataataacttaacgccgctggttctcatgtagtcttttatcatgtccacgattatatccagattttgatttgtctcttttaacgtacttccttccggtgcgatatcccggtcatgaaaagcaaaaaatggcgcatccagtttttcaaacagctcaaacgctgcatctaccctcgctctcgccagatccatgcctttatagtgatcccacggtctctgcatcgtagctgcgccaaaaatgtctgtgccgtcagcggtaaatgtatgccaataggcaatagaaaatcgcagatgctctttcatcgtttttccgccaattacttcttgagaattatagtatttaaatgctaaaggattcgtggattctttcccttcgtaaatcactttgtttacgctttcaaaatagttgactgaaccggaatgagagtgagccatgtgtgatttcccccttaaaaataaattctaaacttgatgattcgaatacagatgattttatgtcatgttatatattagtttgttgcctaaacaaactaacttattttcatcttatataacctcatcagtattttcaatattttttttagttttttacgaacacattagatataataaaggttggattcgctatgtactgcgtttcgcacgataacacagaacgttcaacttaatttaaagattatacaaacggagtggatgaagtggatatcgctgatcaagcctttgtcaaaaaagttaaccaaaagttattactaaacgaaatacttaagaattctcctatttcaagagcaaaattatctgaaatgaccggattaaataaatcaactgtttcatcacaggtaaacacattaatgaaagaaaatcttgtatttgaaatcggtcagggacaatcaagcggcggcagaagacctgtcatgcttgtttttaatagaaaagcaggatactccgtaggaatagatgtcggcgtggattatgttaatggcattttaacagatcttgaagggacgatcgtccttgatcaacaccaccatttggaatgcagctctcctgaaataacgaaagatattttaattgagatgattcttcactttattgcaaatatgccgcaatctccgtacgggcttattggtataggcatatgcgttcccgggttaattgataaaaatcaaaaaattgttttcgctccgaactccaactggagagatattgacttaaaatctttcatccaaaagaagttcaatgtgcccgtttttattgaaaatgaggcaaatgccggcgcatatggagaaaaagtatttggtgctgccaaaaatcacgataacatgatttatgcaagtatcggtacagggataggaatcggcgttattataaacaatgatttatacagaggggtaagcggattctctggagaaatgggacatatgacaatagactttaatggtccgaaatgcagctgcggaaaccgaggctgctgggaattgtatgcttccgaaaaggctttattaacatctcttcagacaaaagagaaaaaagtgtccactcaagatatcatagacctcgcccatctgaatgatattggaactttacatgcattacagaattttggattctatttagggataggcctgaccaatattttaaatacatttaatccgcaagccatcattttaagaaacagcatcatcgaatcgcatcctatagttttacattcaattaaaagcgaagtatcgtccagggtttattcccacctagacaatagctatgaattattaccatctatcctaggaaaaaacgcaccggcattgggaatgtcctctattgtgattgatcattttctcgacatggttcataactgaaatgtacaaacttctatgttttacgctcatctttaaagatgggttttttgttttgttattttcatcctgaatgggagcatttctgacgtgtttttccacacgggcattttctaatatgaaaaaggagttccaaaatagaaagctcctttttcatgcggacattcatttttctttataacggaaatatctgaagtcggccggaatatgatttccgctcgtatcttggcattgcatccctacaaaagctcctgtaaagaatcccccgccgcggatgtaatcatctgataatttttttgattccaatgcaatatcgattttgtaccaatcttctttgttaaatgaatagaaataataatatttttcgttttcaatattcacttttaaatagacgtacttgacttcacgaggaatcacaattttattttttaacggttgtgaaaaagagaagttatcacatatcgttaattcaagaatacggccaagttcttcatcatgcgtgacttgaagagccgtccagttctctgtattgtaatagttcaccaaaccagcggcttgctgaaaattttccggataaaacgcaacagccgtttccgcttcaaaatggagactttgccagcgtctggctacaaatgcctgagtaaatgtcgaagttaaggattcatggccgtataatcgtaaatgatttggcgcttgagttaatgaacctaatttctccgtaaaagggattcttaacgtttgaaaattaatatttaatgtcgcatcctcaaattcatcaacttccggatacgtgtcttcaaatatggtttcaggtatagaagacgcatccacctccaagctcccttcttttccgccttctacataaggccagccatctttccaatagagcttttgaatagctgtttctctgcccaaaggacaatatcctcgctgctgaaaaattgaatcatcgtccgggtgaatgggacgtcccgttaaatgagctaaataccactcgcctgtatgtgtgtgaacaatggatgcatgcccgcatttttgcaatgggtttcctggatcatgccatgacgttaagattggattatcgggatgaacttcatatggccctcgatatttgcagaacgggcaattgtagcagcgtgttcgaaccgcgttcctccttctgcggttaataaataataatagttcccgatatgataaaggtgcggcgcttccgtcagctttctttcagttcctttaaatatcactttcggtttaccgatcagtttttgctccttatcagaatattcctgcatgacaatgcctccaaaggagtgccgatcaatacgctgatcccataacatatttaataaatatttttttccatccgtatcatggaacaaagaagcatcaaaccccgagctgtttaatgtgatcggctccccccaatcaccatcaatcgtgtcacaagtcactaaataattgtggcaatctttccaagcgccatctacgaccttaacatccgtatagatcagccaaaactttccgtcgctgtaacttaaacatggcgcccagaccccgcctgaattaggatttcctttcatgtctaattgcgaaactctctgtaatggatgtgcaactaagtgccaattgactaaatcttttgaatggtgtatctggactcccggaaaccactcaaatgtagatacagcgatataataatcctctcccactctgcaaatactcggatcggggttgaatcctttaagtactggattgataatcttcatgcagaacgcctcctcagctattttctgttgactatcatgttttaagctttgaaatcgtcaatatgatccaaataaactttgtctctattctctaattctcgaaccatgtttttatattttttctcatctaagttatagaaattaatatcaatcatggccagaaccagtaagaacacgggaataatggttgctgtaattaaaattcccgtcaatgcctccggcgtttgcgcctgatttgccacatatccaaactgatctagaaccaaacccggtacaacccctcccaaggccatgccgaatttaaagaaaaatccgataatagcgtatatgagaccgcccattcttttcccggtcttatactctccatattcgattgtttcaggaataagcgcccacatatatcccccggcagtgagacttcctgcagcggccagcaatcgaaaggaaagtatcaggaatacattacttggcggaacaaacagtaaagctaagaggccgatcatattcagtaataatgcatagtttagtaatttcttcttccctaataattgatgaagctttggaataaacggtaaaatgaccaaagcaggcaaacttcccaacaaaccgtaccacttcactaaatccgctctttctaaattatacgttacgtaatagatgccaaccgaattactgattgaattcactccaaaaataataataaaaaaatacttagtacaactagaggccgattaacacgaaattgctcaaatatatccgataatttaattttttcttcagatttttgaagcgtgacacgctcttttgtgcttttaaaacaaaagattaaaaggcacccgcctataactcccataatacccatggttagctgccagccaagagattcgctgccggacgtatcgcttaaataagcagccagtaagggaacaaaaaatgcaacgacaagtccccaagattcgcaaataacatacggacagacgttatactaacaacttcttgattatttcgggtcattgcagaggttaacgcgccatatggcacgtttatcattgtgtatgtaagcgataaaccgacataggtgatataggcatatattaatttcccaatatccgaaaaatccggggttgtaaaacagagtattgccagtatgacaaatggaaaagctccgaataaaagatacggtctgaagcgtccaaacctgctatttgttctgtctactatcgttccaataaaaggatcagcgagagcgtcgatgattctaaccactaaaaacatcgtaccggctgttgctgccggtaaaccaaatatatctgtatagaagaacaaaagataagtagacactgttgcataaattaaattacatgcaaaatctccagacgcatatccaactttttcaaccatgctgatcttctttacattttcactgagcatgatttcctccccttttcgatcctttacataaggaacatgatgaatggtataacatttcttcaattttatcggccagtgaggtctttataaaagcgctttcaaaaaatgatagcagtttactttcacagagcactttcatcgtagtgaacaggataaaagcttggctttcgttttatatatacctccaattaaatcgagcctcttatccccttccatttaagacctttacatgaaggacaattaaagcggtttattagtttgttgatcgaacaaactaacttgatttcatattataaaatcttttctgctttttcaactcttttttcagaaaatttaaaaccgatcaaaggacataccatgttgtaattgccggctccttcgacagacgttaagtaaaaaccctatgtgtcacctgactgatttattaaatgataagcacttccatcatcttttgtttagaaaaacttattaagaaacatgcacttgaaaaaatgcgaatcatatataagtgatatcccgtttaattggttgaggaggatattatgaaacctatgctgccttttgaaaaatattttggtgatttagaactggtttatgcattttatggagctatgcctaccggtgttactgtctcagaaaccggtcgtatattcatttgttttccgaaatggggagacgatgttaaatttacggcagcggaaataattggagataaattgcagccttatcctgattcacaaaccaatttggttaactttgagaatatcaaaatgactttcatcagtgtccaaagtgtagttgctgatggaagaggaacgctttggatactagatacagcggcgcccaatttttctgaaccaattaaaggcggggcaaaattagtcgctgttgatttaaaaaccaatacaatcagaagagtgtatacctttacagaagatgttgtccttccaacaacctacctgaatgatgtccgatttgattttcgtgtcggaactgcaggttatgcctatataacggattcttcttccaaaggaccaggagctattatcgtcgttgatttagaaaccggaaacgcatttagacggttaaatggagcaaatccaacttcaccggattcctcttttataccgaaagtagaaggcaaaattttgatgaatcgtaacaaggatggttcaacttccccatttaggctggcatccgacggtattgcgatctctcccgacggaaaggtattatttttttgtcccctgaccagccgccatttgttctctatctcaacagaagccctgagagatagaaatatatcggacatggatttactttatcatgtggcgtattggggagaaaaaggcgcgtctgatggaatgattacagatgcaaaaggagccgtttatgccggagattacgagaacaatagtattcgaaagatgctgccgaatggcacaatggaaaccatcgcacatgatccgagaattttatggccggatactttttcgattggtccggatggatacttatacgtcatcgtgaaccaattacatcggcaggctagttttcattatggagaagacttacgacagaaaccttatagtttacttcgtatcaaaattgatgaatttcctgctcctgctttttgaaaataaaaatggccggttcaattttagagcataattggcttcatttagcctccatcctaaaccgaataagggattacaataaatacgtgtcctcaattatggagttagattcataacttcattttttttggtcaaggaccaaaatatcgacctcttaaccttttgaccaaaacttaaaaaatcccctgacaccaatagtgccaagggattgagagattaatactgagacatgtattgttcgcgctcccacggatgaacctgtgtgcggaacatatcccattcgatttcttttgcttcaatgaagtgttcgaacaggtgctcgccgagcgctgcaaccatgacttcgtttgatttgaattcgtcgagagcttccgccagtgtcgccggaagatctacgatgccgttttccatgcgctcttctttgctcatgacgtagatgttgcggtcaatcggagccggtgcttcaagtttgtttttgattccgtcaaggcctgctgcaagcaatacgcttaacgccaggtacgggtttgccgccgggtctacgctgcggacttcaacacgcgtgctgatgccgcgggaagccgggatacggatcagcgggcttctgttttgcgcgctccatgccacgtagcaaggtgcttcatagcccggaacaaggcgtttgtaagagttcactgtcgggtttgtgacagccgtaaagcttgtcgcgtgttttacgataccggcaatgaaatgttttgctgtttcactcagctgaagatcagcgtctttatcaaagaatgcgttaacgttatctttaaagagtgataggttgcagtgcataccggaaccgtttacgccgaacagcggttttggcatgaatgtcgcatgcagaccgtgtttgcgggcgatcgttttgacaaccagtttgaaagtttggatgtcgtcacaagaacggatggcaccggcatatttaaaatcgatttcgtgctgaccaggagcaacttcatggtgagatgcttcgatttcaaagcccatttcttcaagctcaagcacgatatcgcggcggcagttttctcccaagtcagtcggagccaggtcgaagtatccgcctttatcgttcaattcaagcgtcggttcgcctttttcatctaatttaaacaggaagaattcaggctcaggtccaagattgaaatcgctgaaaccgagttctttcatttctttcagaatccgtttgaggttgttacgcgggtcaccttcgaacggcgtgccgtccggattgtaaatgtcacagatgaagcgtgctactttacctttttcagccgtccacgggaagattacaaatgtgttcagatcaggatataagtacatatcagactcttcgatacggacgaaaccttcgatggaagaaccgtcgaacatgcatttattatcaagtgctttttcaagctggctcacaggaatttccacgtttttaatcgttccgagaatgtctgtgaattgaaggcggatatactttacgttttcctcgtttactaattttacgatgtcttctcttgtgtactttgccatttcgtaaaactcctcctctaaaaggtaaatgtatatagcaaaacagttgctaacggattaatgaaagaatcgggacatgtcaccttggcggaaagtatttccccgctggaaacggcctgcctgcatcagttcgtttttcagaagctttctgagttcgtcatcagacagattgtgtttcatcggtttggcggttttttcggatttttcttccggttcggcagatgccttatccagaatttgtttgatccccgccatattgacgccttgttcaatcagatttttgatttctaacagtttatctacatcatggaatgaaaataatcgtctatttccttcgcttctcgctggaaatatcaatccattttcctcataatatcgaatttgccgggcagaaagttctgttaactgcatgacaatcccaattggaaataaaggcattgagcggcgaatgttatcactcatctcaatttcctccttttcttatcttagtctcattataggtgatgttatattttgtgtcaacacaatgtaaggaatcttaacatcaaattctttgaaaattgcaaacgccctaaatcagctctttttccattaaagcatttacggcgctgcaaatcgcatttttcacgtgcgcgtaggttaatcctccttggacatacgcgacataaggcggtctgataggtccatctgctgataattcaatgcttgctccctgtacgaaagtgcccgctgccataatgacatcgtcttcatatcccggcatatagctcggataaggcgtcacatgcgcattaatcggtgatgcatattgtatcgcctggcaaaaagcgatcatcttatcagggtcctgaaactcaactgattgaatcagatccgttctcggcgcattccatgcagggtttgacgtaaagccgagcttttcaagaaaacgggcggtaaataccgctcccttcaagctttgcgccactacatgcggagcgagaaagaaaccttgatacatttcctgcagtgaataaagcgaagcaccggcctcacttccgattcccggggaggtcatccggtaagagcaggcctcaatccacttggctttccctacaagatagccgcccgttttagcaaggccgccgcccgggtttttaatcagggagccggccataagatccgctccgacgtggcagggttcccgctcttctgcaaattctccgtagcaattgtccacaaaaacaatgacatcctctttgatttcctttacgaaacgaatcatctcttcaatttcatttattctgaaagatggacgattcgcatatccttttgaacgctggatgccgatcacttttgtattcggccggattgcagcccggactgcttcaaagtccactctgccttctgatgttaaatcgactgcattgtatccgatttgaaattccttaagcgagcctgaatactccccgcctcttactccgacgatttcctcgagtgtatcgtaaggcttgcctgtgatataaagcaattcgtccccgggtctcagcacgccgaagagcgcgattgaaatcgcatgcgtaccggaaatgatttgcggccgcacaagtccctcctctcctccgaacacatcagcatagatcttctccagtgtatcccgtccgatatcatcataaccgtatccggttgaaggcgtaaaatgcgtatcgcttactttatgttttctgtagctttgcaggactctccattcattccgttcactgatttcttctattcttttatgaacggcggagatttccgcttctgtttcttcggcggttttttgtaaaagagcgccgtgggtcagtgtgtcaaacatgttgtgtataccttccttacatgaatttcttcaattctccgagtatgctttgttcttcctgtacataacctgagacttcgtagcgttcattttcttcattaaaataaaggctgtcgatcatggtctctgatttgatgcgtgacatcaatttgccttcggcggcaggcacatgaacttcatacggtgtcatcagctcccggcgcaaataagcttcgatttccgcttttagtttcgcttcatccccggcgattcgggcgctgatcatgatgtggccttctcccgctgtcgggatgaagtcaggaagtgtctcatcacgtttgttataagcggtcagcaccggaatatcatctgcctcaagctcttttaacagtccgaggacagtctgttcatgcccggcataatcttcattggatgaatcaatgacatgaatgatcaagtctgcttccttcacttcctcaagcgttgaacggaaagcggcaatcagcgtcgtcggcagatcctgaatgaagccgaccgtatcagacaaaaggacgctgtagccgcttgggagcgccatctttctcgtcatcggatcaagtgttgcaaacagcagatcttcttcatagctgtctgagcttgttaattgattgaaccacgttgattttcctgcattggtataaccgacgagtgcagcctgaagcacgccgttctttttgcgtctctcccgataacggcttctgtggcggataaccgttgacagctgcacgttaatttcgtgtatgcggtttctaatgtggcgccggtctgtttcaagctttgtctcaccgggccctctcgtcccgattccgccgccttgtcttgagagattgattccttgtccgctcagacgcggcagcgcgtattgaagctgggccaattcgatctgaagctttccttctctcgtcttcgccctttttgcgaatatatccaaaataagctgcgtgcggtcgatgatcttcgcttcaattgcagtggcgagtgatttaagctggctcggtgacagttcatcattaaaaataaccagatccgcttcaagctcttcacacagcgccttcagctcgtctactttccccttgcctatgtatgtagcggcatccgctctgttccgtttttgcgtaatccgggtcagcaccgttccgtcagccgtttttgtcaatgaagcaagctcttccatggaatgttcaaagtgctcatctgtcatgtgcggaagctggcagccgaccaaaatgaccgtttctttttttccttcctgttcgttcaaatggatgttcctttctgtgtcgtattgggcagtagtactatcataccaaacccgcagggcgtataccacacatccggcgggttttaaagagagaaataaaaaagagacccctcaaaccggctgagaggtctattcgtgagctgccgcctcatcttttataagtaaatcctggctcttgatcgtcattaaatcgtttttcaagtattggtctcccattaaaagtctcatggcctgagcgcggatcgatttttcaatcacgtttctgacaaagcgcccgttgctgaatttaatggggcttgtcgtgcttttcactgtcattaagtaatcttttaacttccactcggcttcctggcttaattgatactcccgctctgctatcatgcgctttgcgatgtccatcagctgagtgacagagtaatccggaaaatcgatgctgatagggaagcgcgattgcagaccgggatttaatgacaggaaatgtgtcatttctctcgagtaccctgccaggatcagaataaattcatgctgtttgtcttccatatgtttgacaagcgtatcaatcgcctctttaccgaaatccttttctccgcctcttgcaagtgagtatgcttcatcaatgaataaaatgcccccaagcgattttttaatcagatctctcgttttttgcgccgtgtgtccgatgtattcaccgacgagatcggcacgttccgcttcgatcagatgtcctttggaaagaacgttcatctcgaagaaaagcttgccgatcagtctcgcgacggtggttttcccggtgccggggttccctttgaacatcatatg
